United States Patent Application Publication US 2026/0258423 A1 - sequence listing, part 29

SEQ ID NO: 167803 - DNA, 46709983 bp, Homo sapiens (residues 36,700,709-38,368,922 of 46,709,983)
  source 1..46709983: mol_type = genomic DNA
gtgaggctggggtgcgggaagtccgggcaggagagacccgcccccgccgttgctgagctgagacccggctgaaagagaggggtccgattaattcgaaaatggcagacagagctgagcgctgccgttcttttcaggattgaaaatgtgccagtgggccaggggcgctgggacccgcggtgcggaagactcggaacaggaagaaatagtggcgcgctgggtgggctgccccgccgcccacgccggttgccgctggtgacagtggctgcccggccaggcacctccgagcagcaggtctgagcgtttttggcgtcccaagcgttccgggccgcgtcttccagagcctctgctcccagcggggtcgctgcggcctggcccgaaggatttgactctttgctgggaggcgcgctgctcagggttctggtgggtcctctgggcccaggagctgggagggctgcgccggcctctggagccccgggagccagtgccgaggtagggagacaacttccgccgcagggcgccggacggtcggggcagagcaggcgacaggtgtccctaggccgcagggcgcttccatagcgccatccccaccaggcactctactcgaaatcggaaagctcgaccttttgcgttcgcctctgccaagcctgttatttgtgctggccgctgggtctggagctgcgcttctcggcccctccccggtggagcgcagagggctggtctgcaagcgcggcctccagccccgcggctccccggcccaggagccaggcgcgggctgacccgggagcacccggcagcggagggggctggaagcggaccctaggcctctcctgtgccacccggccctaccgcgcggccgcggggcgctctcctctcgggcgcagcggtccttcagcccagggcaggttcctccctttcctactcggaacgtggcaaagataccccagtcccagcccctccagctgagagctgttgcccaaggtcgtcgctacttgtccgctcaatggtgaccccttggcagagaactagggatgattccactccggttgatgttttaggggaaattaaaagaacattcggttttctgagtctccttccggggaggcgtggtggtaactggtttgctgggaagagccgttccttaaccgcatgcaacaaagcaggtgtggaatccggacgagagggcactcactgccttctgccccctttggaaatagaaaaagccttcgaagcagcaatccaaagatcaaatgatttgcggtcaatgatttcaattaaaccagaaattagtaagggagggccgagaagacacggctgctcagaagctgttcgctgtttgagggatttcccggagagcctgttaaaagatgcgaagtggtgggtgtaccgctcagccacctttaaaccggctctgtgcgttctggctctggaaagcaagtctccaggcatttgggctcagaattgctgggccccgagtttgggcgggggtggtccttctgggggtcaggccttgagcagcttgcactggtggcaggtttgggagcagttgaggggcttcctgtgtgtcttttggagggggtgaccctggaagttggcactctggaagggagctgtttggccctagagttttggaaagggccctgaacctgttcggtccccctcggaaagggaagggagcagtggcttagtccctccctcctccattcgtgcaatgcctggggtaggggtagacctggagccggtggactcatatccttggaattcgtcaggacagctgctccggggccttggccctcagtcagtctggggctgaggagtagggaagctgggaacttggggcagaggaagaagatgcgtttagaaagacctccattatgcaaactggagtccatttatgcaaactggtcacccttccagtagctccaaagagtggcagtggagtggcatcttgattgatttaacctcttctcaggggacctgggtctgcgagggaggatatggctgcggggttggaataggatctgtctgagctgccagggtcagggtggtggccctagggaggttttagggccagggtggtcccgggctgtggcaggggctctcagatcgcctcgggctctcagctgcaaggtgaaaaataccatgaggaattgatctgccaagggcggtcttgtctcaaagcaagtggattgctggggtaaagaatctagagaccagcttaggactctgggaggaagaaaaaaaaaaaaagaatagcatagtcctaaggaactgcaaggatcaccagattaacccttcatacctggggaaattaaggccagacatgacacaggcctttcccaaggctctgtagcaagggcaatagcaggccagttgctgccactgcggtcctgtggggcatgttctcactccactgcacccaggaggctgccagcctctgttccttttaacatagatctcctcagttgttaagacagaaagaggaactcagaggggtccctgtgtgcaaggcagagggagaccaccagaaccagggtaagcaccccacttggtagccagttcaaggacttggggatgttttcaacatttacagcgaggtttgaggccccattgtcatgcagcgctactcggccttggtctccttatctgtaaaatgggcccattagcaatgcacagggttgctgtgatgaagggtgaggtcccacaagcaaaagctgtgcagtgaggggggaatcctaagcattgttcctatgccattcaccccttcctgtgagctccccatattccctggctcaaaggagtcttgaatggcagggatggaggactcactgcctggactttgaagacccctgctttctgggtgaccaccttttcttccctttgacagtgaactaatacattggaggtagatagtgctgggaagaggacaggagaccacggctgactttggacatgggctcgaaattgataacttgatgagtcttggagggtggttaagataagctcggggctggggcagcgctgaggtctgatggtcagccagccctccccaaagtgtggccctccgttctggagataggggctttggaaactgcaaaagcgtcctggcaggccagctctggttgctccctggccatagctgctctgactacaggcagcaggacgcaggtcggcctctgcccatcggaggtcagaggcagggcctccagcaccagactcagcagtgccactgcaaacctggcacaacaggctggtcccaggactcagctcagcagtgaagttggaaaccaaggttgagtctccccatctccctttccccaacccgaaagacccaagatgggtgtgggtgaaagagggagaaagaattgctactccagaaactgtcatttgcccacacgaaacgaggtggggttcaaggtctgaactcttccagtgcctgggtgcctttgggtttaaattcagctgcaggtgcccccatcaccacttccacctgagcacaccacgagaagccaggttatcttagaaactgtttcccggaatcaaagcgacttgatttggagagttgggtgaggagaaactcacccctatacccctcagggcgtcagagatgtgaggcaattctctacctccgctggaaaaaatgcagatttattaaaggtcgactgtttagcagaacaacgtagattttttacaacgctttccccgtctctgctttgaagcctgccaggctgcagctggggatccaggagggaaagcccgcaggcgcagaggggacaatccgggaagtggtaaaggggacacccgggcacagggcctgtgctttcgttgcaggcgaggaagtggagcgcgcgctgcagattcagcgcggggctagaggaggggacctggatccctgaaccccggggcggaaagggagcctccgggcggctgtgggtgccgcgctcctcggagccagcagctgctggggcggcgtccgaactccccaggtctgcgcacggcaatgggggcaccgggccttctgtctgtcctcagaatacgtaggatacccgcgggcgacaagccgggccaggctaggagcctccttccctgcccctccccatcggccgcgggaggctttcttggggcgtccccacgaccacccccttctcacccggtccccagtttggaaaaaggcgcaagaagcgggcttttcagggaccccggggagaacacgagggctccgacgcgggagaaggattgaagcgtgcagaggcgccccaaattgcgacaatttactgggatccttttgtggggaaaggaggcttagaggctcaagctataggctgtcctagagcaactaggcgagaacctggccccaaactccctccttacgccctggcacaggttcccggcgactggtgttcccaagggagccccctgagcctaccgcccttgcagggggtcgtgctgcggcttctgggtcataaacgccgaggtcgggggtggcggagctgtagaggctgcccgcgcagaaagctccaggatcccaatatgtgcttgcgtggagcagggagcggaagaggcagccggtcctcaccctcctctcccgccacgcacatatccttcttgacttcgaagtggtttgcaatccgaaagtgagaccttgagtcctcagatggccggcaacgcgccgaggtcacgctccccagaaacacccctctcccctcccctaccccagctccccctggggcgggtggtaattgggggaggagaggccgcaggcagggaaggggtgggaaagccagagagggaggcacaaagtgatggcagcccggcaaacactggggcttcgggctgggccgcgctcgtttaatcccacaaaaatcccattttggaggtgagaaatagaggttagaggtcgggcccttctggagatcagaccgaggagacgggcccagctggcgtcttaaagcaaggagggggagtcgggaggaggtgagacccctgcacccaggtggggctcccaaaccgttctggatttaccacactcccaggtccgattttccatggagggctggggttagggactggcaccttcttgttgttaaccgcatttgatattcacaagaaccctgtgaggagactttgtcaccgtttttagatgcctgaggttgccggaggggcagtgagagaatcgtctaacctggtgttcctaccacagtccaggccctgtgtcctgggctggacccacagcccctgccaccacccagaggaaggcgcgaagctggctgcctcctttacgggtctcccttaggtgccctcatgaagggggacggccacctcacagtgcaggaactatctccccgtttgctcccaaatagtcttcttggtgtggtgctgtctatggtctgtgacctgcatctggagttacccccaggaccagcttcggaagaggagggatcgcttggaggccgtgcagtgtgaggaacggcaggcagggtgtgggaccaacatgcacacactcgcaggtgctggggccagggaggaatgaggcgctggctccctttccctccatttctccctgggggtcccagcaacctggccatccctgacttccaacagcacagcgtccccacaggtcctgcagtgctctgcaggggtgcagggagctcccctccccccagccgcaacctcaccttcctcacccccacccctccggcaggaaaccacaggctgggttggggacccctggtgctccaagagagcagtgagtgctgggagccgctaaccccgaggcgcctagcacagactcttctcaccccttatttctgaaataaagcccttccttaggtccagatgaggaccacgtgctcagtgcctcactttcgtgggagtgtatatcactttacagtatcaagacaattttctttcgttacaaatctttatttagtctctgcgtttagaccaaagtagatttttatgggctgagtgaaaaaacctcgcccgcattggtttctgatggaacagctggcagcgccacggccccgggtggggtggcctagaggcaggggtgcttgggaggaacatctagcacccgaccacctccaccaggtgggaaagggacgtttgcaccaaatctccgccggcaaagcagaggctttggggaattacagaaaaactataatgatctaaaagagaacaagttatcttgaactgtgcgggtatttgaatcatacagaaaattgtcctgtgtgcccaatgcacttttgcatgtagagccagggccttcgaggaagctttcaggagatcccgggcagcggagtctggtctggagtttcatttccgtaggtgcagatttctccccaagtcttcccgccatgggctttgcaagaagccagggcccagaggccacgctcaccgttaacactgcacagggcaaaggtggctccaggacaactgcccaaccccaggaacgacccagcagcagagaaaaggacagctgccagggtgcctttgtcgctttttggaaatcagaattcctgggtccttagttaagtcttacttcaccaaatcccaggaccttcacattttggttcttgccattgctaacagttgtaaatgctgccgccacgaggcctgggaggaaggacccgctggtgagagcacagggagtgctgctgtgatcacggtggtgatgcggggtgagcgcgatttcccgggattaaaaagccaccgctgcccccgtggtggaggctgggggcccccgaataatgagctgtgattgtattcccgggatcgtgtatgtggaaattagccacctcctcagccaggataagcccctaattccttgagcccaggaggagaaattaaaggtcatccctttttaaattgaggaatagtggttttttttaacttttttttttttaggtttttagttgccgaatagggaagggtttgcgaagccgctgccctgggccgaggtgcattttacgcttccagaggtcgaggcctccagagaccgcgatgcccagggcgttcccggggaggctgagagacccagggtgctctgggtgactgcacggcgactcctcgggaacccactcgtggctgcccgcttggaagggctttgcggccccgggaacgatctccaggatctccacggctggtcaggttccccgtccctcgtatcccgcgctgcccgggggctcctgcctttggttcagtgctcgcggcaccaccgcactcaggacggcagtggggggctggggctggggctgggcctggcccagcgtgggttggggcgggggacgcgccagcagcgcccgcagctcgctccgcaggggtcgcagccaggggtcgggagctaggctcgtgggccgggagacgccgggcgcgttgtcctccggggaggttggggtgcaggcggtgcaccgaccctcgccatctggcgctgcagccaccagccacggcgcttagtggagggtctgcggccaggctcccggcggaaagattccggggagggctcgggggttgtcccagcccgcgctaagcgccgcagcctcgcccggctttcctgcttcctcggactgtgcaggggaagcctggggtctcgcggggcgcagcagtcaggtcgagggtgcagcaggaggggagtcctgacgggcaggtccctctttcccctggtgcgcaacactggttggtagcttttgcggaggtggtgaagaagggcaggaggcctgttgagcggaggagtccggggatccctaattatgtgacaggagaccctttccagttcggcctgtggcccatccctctctcaccgccggcagattggagtctgctctcggggagcccccaggtaaacccctcacagggagaaggtttcggattggaaggaggaccgcgctcgtggggcgcctgtgagagctgggaagcccaaggggtagcgtgtagggggttttttatgcgggaggagctgcctcctgggcggcggggactttctgtctcagcctgtctgcctttgggaaaacaaggagttgccggagaagcagggaaagaaaggagggagggaaggagggtccttgggggaatatttgcgggtcaaatcgatatccccgtttggccacgagaatggcgatttcaaagcagattagattactttgtggcatttcaaataaaacggcaatttcagggccatgagcacgtgggcgacccgcgggagctgtgggcctggcaggctcgcacaggcgcccgggctgccggccgctgcggggatttctcccccagccttttctttttaacagagggcaaaggggcgacggcgagagcacagatggcggctgcggagccggggaggcggcggggagacgcgcgggactcgtggggagggctggcagggtgcaggggttccgcgtgacctgcccggctcccaggcatcgggctgggcgctgcagtttaccgatttgctttcgtccctcgtccaggtttaggagacgcgtggggacagccgagccgcgccgggcccctggacggcgtcgccaaggagctgggatcgcacttgctgcaggtagagcggcctcgccgggggaggagcgcagccgccgcaggctcccttcccaccccgccaccccagcctccaggcgtcccttccccaggagcgccaggcagatccagaggctgccgggggctggggatggggtggtccccactgcggagggatggacgcttagcatgtcggatgcggcctgcggccaaccctaccctaaccctacgtctgcccccacaccccgccgaaggccccaggactccccaggccacctgagacctacgccaggggcgcctcccgagcgtggtcaagtgctttccaatctcacttccctcagcaggttccacccagcgcttgctctgtgccaggcgccagggctggagcagcagaaatgattgggctgctctgagctctgaagcattcggccgctgtgtgtgtgcaaggggcgcaaggacggagagacagcatcaataatacaatattaacaggagcacttgtccagagcttactgcaagccacattcagttccggaccttattgacttccccctcccatctagagtggattctggtttttcaatttgttttgttttgttttttgtttgtttgtttgtttttgagacggagtctcactctgtggcccaggctagagtgcaatggcgcgatctcggctcactccaacctccgcctcccgggttcaagcgattctcccgcttcagcctcccgagtagccaggattgcaggcacccgccatcatgcctggctaatttttgtagagacagggtttcacccaggctggtctcgatctcctgacctccgatgatccgcccacctcagccttccaaagtgttgggattacaggcgtgagccaacgcgtcctgccttgattctgtttttaactccattttttagaggaggaaattgaggcacagagaggttaaataacatgtctaaggtcacacagcaaggggtggagcggagttagcccactggcctagctctagagcccacccggataaccagaacttggtgaggcctccgggctcttgcttggtttggagccaggtgcttagcgccccgagcccggggccattcaccctgcaggagctgcacgcgcccctgacctcggcttttccctggcagcagaggggctttgcgggtcggccgggtagccctgagcacagctcgccacttccaggtgggctgttggcgctggctggggacacatcccgatctttcaaatgccctttacagagcctcatcaacgacccgattcattcccccctcctgtcatttgtctctgccatcgaaaaatgcctaccgagagctgctctgcatttccgccctctattttgtgttttactttaaaataataataaaaaaaatgttggctgcaggacgccatgacttaggtcagcgagtcagccgctagctctgcatttccaaaaagcagatcttttcacaactctcttgccccaagtgccctggtgtggtttattttttaaaatgcatgcctgcggaagagaagacccggggaatattcgaaaccccgagcttttacaacataaagcgcatggtgtggccgcggcgagtaatggcgctctgggagccctgcccaggcggcctctgctcgccctcctccacttccagctccgagctgggtgtgttgcaagtttcatactcctacatattataagtgacactaatatcagggacaactaagtgctggggaacttcaatgaaaacctggctggtaaagtcaacacccccagacttctctgtgctacatttctttaattaattccggagtggtgtgtggacgggcgtctttgcagttattatacacgtaagtgaattaggccatttgaagctacgaagtcatacccaacattttccattaagaatattatttttttagctactgctggcaacttttagaatttaattatgataattttcctcttttcctcattatcccagatatggctggttgtgagatactttttcactaaatgtgtctctttaatgattttggaattaagcaagcatgccaaatgcgccaagacatttataactttagaaattgctgtatagtatatatttttggaacaccacaggtttagttgggaaaatattttgcagctgagttagaaacttgaaagttaggcttataatcaagatgctgattttcaaccttagcatcggggaaggtaatgatagtttagttggcaaagactttttgcagcaaactgtatttgagacagcagaatccaaggatatctttcaagattcacttatactacattctttttagccccctctctaggggtggagggggtggcttagaaaaaccaaaggtaatctggtttcaattacatgctgtaaaaatagaatttgtggccagaaattaatttggaatattttttatgggggcaacattgtgggttgtatgagtctttcaccaactttattgcttttctttggttctggatctaaaatatgaatgagtaaataaaatacagtttcctttttcaaaaataatttagtctttttatccttgacacataaatataatcattacctttttatttgtcttaattacctcttatagttttactttatttttgagggttagccaacttaggaaaaatcagaatttcatttgggtagttttcatttttcagaagttgatacttttcctccttgaattttgcaaaggttatttgatctcttgcaaattctaaataattaattctgtagacatagtctggtaaaataaccaggtattttgttttattttctgggcagtggtagtgttcggaatttattattccaacggtacttagaggtaactagaaaattgtggcaaataaagcatatgtcctagtggtataaatgactgccaattatgacataaaatggtctatatagtggtagattttcccctaagtaccatagaactccggatttgtactaagtgctaaaataaccccaaacaataaagctactacgtttaacctgagcttgataggaattctcaaatgttttgcatgatttttgtgatgtggatgtatgattgtttctaaagtgctttaaaagcatttcagagcctggcctgggaactaaaccctgggtgctgtttcctacagtcctttttaagaccctgggcttcatttttgcatttagcaagtatgtgttgatggtcatatttgatgcatccctccatcccagtgactgtaccattgttagatttaactctaatgtagaatgatcatctcttattctgacactttatcttttacagactttggatggatttgtttttgtggtagcatctgatggcaaaatcatgtatatatccgagaccgcttctgtccatttaggcttatcccaggtgggtattgcctaattttatgtgcaaccaaaatattaaacgaagtgacagcagattttgacagcctcacccaacttgaaaatgagtctgtttaagtgtttgcttttgtgtaagaacataaccctaaattgcaaaatcctcttctcaggacatcctgcaggggttttcttctccatattacgttttacttttttactttctttttcccttggggtttcatgaccagtgtgtcttcaccccgtcagccttgttccgagattctgccaaaacccggactatctgcttatgtagtaatgctagatgccctgaaaagagctccacaaagggacatgtttcagtccacacttgctggtctgcacgttacggtattatgagttgctataaagcaagaggtaagctgatgtggaacatggattttatgcagaatgttctttggggagagagaatggggaggggtagatttatgagtgttcgcatggaattcggggtcatttttcctgactttttccagttcagtggtcgtttcagcaaagcattttatatgcttgtgatagaaactcataaaactcagtttactactgttttgaacagcaaggtttctttagaacatctgaatattaccaatttttctggaaagatggaatcatcttcttaaaaaagtccaccgtttccttagaggaaagagggggactcagctttgtctctccctggcaagccaagggtttgatgggggatttgggggctccctgggcccattgaatgtctgaaaggggatagtgtaactgatcattctcattcacatgcctgacttaacaaatgtggatcatgattttaaaagtcacattttaaactacatatagggactaaatatttcttcacattgtgtactatcagagtgatttttcaccgtgactgaagacacactagaattaatgatagatacagaggatgggttccagagaggcccatattgaatttgaattacacctgcctcctaatgtagttaagccaaaataaaacatgccgattaatgtggcttcagtttgctcattgaaaaacaaaatgaccacatttggcaaactgcatctggtgtattccttttatttttctgccaatacttttttttataagcttgctatttatttacatccttctcttctgatgtatggatatccttatccagatccacatgggtttatgtaactctgtgtttctcaggcaaaaccctttaaaatgaattacatattaaaatgatatggaagtttttctcttcctcttctctgcttttatcaaaccaagtctcccaaatacagtttactaaggcttggcacttgtgcctatgtgactcgtgggattagtgtacttgtagaatgggaactactgttgggaacaggaaatttactattttccataattattaggttgatgcaaaagtaaatgcggtctttccattacttttaatggcaatgaccgcaattacctttgcaccaacctactattattattctctgaatttttatcttgccctatttagaatcatgcagggcccttaagttgtacccagactagtttctacttctgacttggcccaattacttaccttttttagtcatttagaaaacctttcatagtcttacagtaatgtcacaaacacaacaaaacatttcacacacttttaaagatgactgatcaaaaatcttttaaaataggtaaagtcactgttatcaaatattaaatttagatctgagctccctagcagtcaaagcaaaaagggaaatgtattcagttatagagtttttattgtctgatagggcaggttctttaacctacttgaaccatgtaacttaaatagtaaaatcatgcctgctctatctgtctttaaggatcgtggtgagaaagggatcaaaatgcctatttcatgtgatttacaaactacagggggcaacacaaaatccaggcatacccacagtttcatttgagcaaacttgctttcagtagagtcctttgggggctcctattagggctgcttggtcatttggaatgtcctggcccatcaggaggtactgtgcacatcccaagagatccggtgcattcagtcaggccgtccaagttagcctctctgtgttatttttctctttttatgtggaaaatagaattgattgattataaacacaataattaagaaggaccaaaatattggataggtgacaaatctgcctccggttcgtgatcggctccacggaaggaaatccaggcagcctcacaagttgaagtactctatttcctcatgatcataatgcagcaggaaaactttgcatcataattttgagagaggagaggggttaggcactaccattttctaagaaagttgtagagatacatacattgtctctttctctccagtagaagtgatagtttctaaaaagataagtcaaactgatcatttgcatagagcaactgattttttctgatttctctgcggggctgtgttagcatcagttcacagctacaaaaacactttagtgccaagtgccctctttgtcggtgtctagggagcgttccacggtgaactgtttaaataagcaacaacttttctctcaaatcttccccctgttcatgattaactccatagaaggaaatctaggcagaatcacaatgtgtatttttttctgtcttctttacttaaatagtaaaataaagtattgaataggatgtcaaatacccaactggtcttttaaacatttttgcaccttttagattattttttaaaagtcaggcaaatgtatcaagcatgagacctttattaaaatgggcttaaacattttttttaagtcatgagagataaaagtgttaataaaattttacccagtagtcagagtaaccttttaaaaagaatttctgatgaataacgatagtagtaatagctgatacatgctgctcttttgtgttccaaaaactttcaattaccttcaatgacattatcttattaagtaaagatgtctttcatgttgattcagtgttaaactttatgttaaaagatcatagagaatgtaagcccctagatctgctataattgtgtggaaattcactacaaagtgattttttgttttgttttgtttttggtctaacctctactaaatgactatccaaattctttatttgagggtatggaaatgattctttatgggttataagcccatccccattccaagtcttttattaagccttatttgaacaagtgttgaaataaatctgcttcgtatggcagagctaaaattttagttttttttttgtttacactagtaaacaagtgattgttgctgccaaactttggtactaaaacaatgacagagacaaccataaaatgccagttgtctcctcagcccagggtccaagtgttaggcagtagagaggcaggctttcagcctgaaaactcccgttggtgggcacactcgcacacgtgtccacacacaaagcatctagacaagtttctatctacgtggatgaggtagagttggggcagcaatgtttttccatgcgtgtttactaaatgatttagttccatgtgctgttttggttaatgcaattattttacttttatttagggaggaggaagaaaaatccccgtgtaaaaatgtagctgctgtatacatttttaagtatccttgggttaagtttcctcaccaacatttcacacagttatatagcatctaggtaactagtatacatgttcaaataaatatacgtatgtaagaaatagctatttatgagacacataaaagaatgtcttatttgagattgtggccagaaacaaccataaacatatcgatgatgttgtttggaggtacaagacctaatcctttcacttttgaaataaagacaaaagacaacataattatgtttgttgacataacttgaaccctgaaacccaaaccatcttgttttaaaatccttaatttaccatactcagcaaaacaccccagagtaacgtgcattttcagagtgccaaacaactctccccttccacacagaatatatgcatttagtgctgtatttatcatgtgtaggtttcttggcaagaagaaaagctattcagcaaaacataaaaaagctcttagtaggaaagctatccattttgtagttagcagggttttgcaaatactaaaatatcacatggaaggtctgttttaataaggctgatgcatgagacccagggagttttatagcgacaaccataattttttttttttttgtgaggtagtcacatttctctcagtgttcaaaagcgtggatagatacgtaaatacaggaaacaccatgtcaaccataattttgacttaaggtcaggactgttttatcattccaaaatttgttctgtaaagacatttccgttatttgaaggctgtttcacttcctagacagctctggagttttcccgttcgttttgtcacagactcgagccttcagaaaaccaagcctttcatctgtgcaacctcacccttctcattcttcaaaagcatgtgttgagaacgggaactctgaaaacataagaacctactctgggattaaaacgcaaatctaacccttaataagcacagatggaaggtctttctgcaaggaggtaaagttgtttcccgaaaacacatcagttacttttttccagaaaagaacttcgagcaaaccagaattattctttttccctgaaaacatggggaagggagaaacgataggccaatataacatttctctattttgttattttttcatttttaaaataaactgttgaaattgtgagtcactatatattttcttttctttctttcttttctttttttttttttttgagacagagtcttgctctgtcgcccaggctggagtgcagtggtgcgatgtcggcttactgcaaactgcgcctcccgggttcagacgattctcctgcctcggcttcccttgtagctgggatcacagccgcatgccaccacgcccggctaatttttgtatttttagtatgacatgatttcaccacgttggccaggctggtcttgaactcctgacctcaggtgatccgcctgcctcggcctaccaaagtgtcaatatatattttcttaagccaactctcttagtttttagcttctgccactccgcacctggacaggccttcccagggcatagtcattgccaccctgaggaaaaaaggaaatggtcctgtcccaaatggctggcttacctgttgccagtttatttaaactttttaaggattaacaggaatgactcgaaagaagaatatttagttttattatttttcttaaatgaaatcctgtaataaacttttcagggaggcgaatgtccgtctgggagatctgttgagaaagtgccaggcttgggaagtgggtgttaagtagagggtagggaggattcctctaataggattctctctgttgctctgtttgcataatattggaaggaaacattccatgaataatgtaaaacatagaactgtgagagccgttttagggacaagatgacttagcaggccagaagtgtaacttattctgaataagaaagcaactcgctcttcttaacaaattggaagaactggctcagaggagtgcgataaatcacttcacccctccacgaccccttggtcccaagtaaaagctgatggcctagatgctaatctggaactgcaactcccagaacttctccattaagcagctggctgggttgtcctgttgcgtgaggtggcaccgtcaggatggccactttgcagataatcatgttgtctctcctctgatggagagccacaggctcccagcgacacctgcagcaagacacacctaaaaataacaagggggtggctcgggacaagacacaccatgagcctccttttgttatcttgagttaccctctctccttccggcagggtcaagaaggaattctccagacctacccaagatccttcgccacccaaggacggtttcccacatgctttgagtttcttctcaggctgggcactgggactccccttggtggtggaggaagtcctaccactgcccctgggcctcccctgaacaatgctggggttcaccgactcactgtccttgtctgccaccctcagcactattgattatagctctaaaaataggatccacccaccactgctcagaaggctgctctgctagtcatttctagaacattctgtgccactgtccatcttaaggtgggtgggggcccaggtgttgagactctatcatatcctctcctggtgcttatgtttgagagaacattcgaaagattctcaagttcgggaatttgggcctccagggacctctgtgtaaaaattgtaactatgatgggtattttcctggggccatccattcctgcaaagtgacatggatgtgctgtcctctgtgggctgtgtctggaaataggtagcgtcggactgttgaggcagcaaccccaggacataatccccatataacgtggctctctggagcaggcccagaccctcccgcagggcacgcacagccccagccacacccctgggcgggagccacagaattagcacagtcatctcggactgggagggccagagactcattgctggtaatgtgagagaggcctggcagcgcctgaggggcacagctcagagtcgacgaagaaagggcctttgtctgagttcatgtcctcctcgggcgcagtggcgcccctgccgtggacggctggtcggcctcggagtggacaacacttccacagggagcactatgtggacaggacagctggccttctggccacccagtcccctcagatcgccagcaagggaaggacagagaccctggcctgggtctgtttcaagccctcttctgtatgaaggatgctgcccaggccagcagcgccgcccacctctggtgcccaccttttccaccctttgctttctggtccttcctgctaagggttctcttggctgcaagctcaagcctcagtgccatggcctttttagacagtgtgggagacagttcagagctctgagctctgttgagaaaagaaaactgtttctgcgtttggcaaaggtgtgggttgtcagcagagatcaaagttctgttcctggcagggtgagcacctgtgacacaccttgcccctccccctgcgccaatcccagagaggcggtggcatttctgacccttcccttccacggcaggtggagctcacgggcaacagtatttatgaatacatccatccttctgaccacgatgagatgaccgctgtcctcacggcccaccagccgctgcaccaccacctgctccaaggtattccatccagagggaaaaaaaaaaacagactaaaagcaaggcgacattcttaaatggaactcagggctttgcttcccacatctgccaagtggctgggcatgactaggactgcccagcccaggtctctccaatacacacacagcacccaccacgtggggatttgcattgatacctgtgtcttttaagccaatattcatcaagctcctattgttggccagaacccgtgttgagtgctaggtagaggacaaaagtggtgcaagcctgctcccctcgtgctcttgggtcagaattccagggattacagcatcacgggtctagaccaagcttctccttaaccaagatgccgtgcctaaaactcgggggtcgggggtggtccatgacatttcatggggaaaattacatatgtgtttcctccagttgaaatttggcatttcctttgcttctgatgatagatgataaaccatcttggggtccctagtacctgtggctttgccaacaatagaaatcacagatgttttccatatcataggaaagttttgcaggtttaaacatatcgcttatgcccacatgcctacttcaaaatttcaggagttctaagacctgctactgaatcttcttatttatgtattaataaagcagcacatttatatccgtatcactgtgttgaaatattttgataattattttccaatacagttgcttttttggtaatcttatatattttattttatgtatttaaaaatgttactccaagtagggatctgtaggttttgtgctgtggcacaaatcattaagaagccctggtcattacacaaatgactccttaaatttcaattgtgatgagtgctaggaagatacagaaggacttattccaggggccctggccttttaactccctccaaccatccagtgaggccaacaggcctcttgacaaatgggtcttatgtgtgctttggactatggcacccagcttggccagaataccccagtggaacaaaatgcaaaagaagaggctttaagggtgatgagaatggggtagctggctgcaggaaaaacatgagttgcattcttattgctgtcttctgggggttggtggggagaggtcattctcgggctgggaagagagaatacaaaatagcacacacagttgtaaaatcccttgcagacagttctgtggcccgcaagttccagctccagaaatagtcactggagtctaattattccttaccaaggagagagcctggcatgttggtttctgaaatgagatggggcacctagttgtagctaaggtctgattcttggatatgatatgtctgcagacatcaacatgaatcatggctctgaagaggtaatttctaaaaaatgagggctaggctagaacatcgcacctgaatcgaattctttcactgtggggttgtttaaagctggacaaagacaacaggtgtcagagaattgcagaacatagtgctgttactgtttttgaaaattgcacagtacggttttttgttttgttttgttttttggagttggagtttcattcttgttacccaggcaaggagtgcagtggtgtgatctcggctcactgcaacctccaccacctgggttcaagcgattctcctgcctcagccctcccaagtagctgggattacaggtgcctgccaccacgcctggctaatttttttgtatttttattagagacagggttttgccatgctggtcagactggtctcgaacctcaggcgatctgcccacctcagcctcccaaagtgctgggattacaggcgtgagccaccgtgcctggcctgaaaattgcacagtatgttaactgtatgggactgggctttctccccctacccccggtttcattttaccctgcctgggtcataacctcccaaagagggattataaatgagagcaaatgagtcttgggaatatcatgagaccctttcatgccctgtttctgtagcctttgagtctgaagcaacaagggctggaagcattgaggccgcacctgactcatttccacagccggccgaggggtgcaggggttgagattcccaagtgctcgattttctccccagctgctccattttctccccagctgctcccttgctgactttccgtgtctgaaatgacccccgttgttttatgataaacctgtgagaaatgggctctccccagaacttggtaattgatgaccagttgatgtatttttagacctgagcttccacccaccgtgcttgtctggaaatggctggggcaggcagccatgttagagggaagctttttgcccaaagacaccatctgcagggggaattgtgggtaaaatatggcagcctctccaactggggcagggggtgccctctgaggtgattcctgagcttccacagggcagtgacctcagggagggtggaagactttgcttccattcctagtggtaaccttcctttaaaaattcatgtattaacctccaccaaagggctgtttatttagagtggagtgacctcgccctcccttagaggtccttctctatttgtgtcttagagtgctggtgtcccttcctgaaacagagggtgtttccttaggggacacatttgcattgacaatagtgaggtcagagatttgcgtgggaggcctgcaaaagcaaagtgagtgagtgggaagggcagagccctggagagacagagacggggtggtccttctggggctagaaatgagggtgaaagcatggatctgccaagccttgggtcacacacactcaagtcctgctaccctgagggaggtcagaggcttctgggccttcctggagcccacggcccccaggagcgggcgacggcaggtggagctctgcagggcccatcaggggcctcaggggtggcctcgtttggctgccttcctttagagccaaggaagccacaccaggactgggctggtgtctccactgccccacccagatctcagccaaggccgaagatctctgagcagggtctgggcacactgagaaggcctctgggtgctgcatctggccctgggaacacattggtgcggttggaataaggatgggggaagcacggagggacagctgccaacctcatcttgctcctgcttgcagagtatgagatagagaggtcgttctttcttcgaatgaaatgtgtcttggcgaaaaggaacgcgggcctgacctgcagcggatacaaggtacggggagtcatgggtgcggggaggagctggctaagggtcttcaatgtgtgttttcaagagcgtctgcagaaaggaaggcacgggagcacaaactcgtcatccccactaatgtagagctctccagcaacgtggtgcacagtctcttggaggctcatgtgagagctggtgttttaggaggatgttccagctggctggaattcatcgcataagacccggaatcagtgtggcttagggcagattttattaataccttggcactttccatgtggaccagtcccagtggagccaccgcctctggagtttatagaggcccatcctcctgggcacagtgcagctggcagtggtatccagagcacggacactgcccttccccttgggatgctccaccaagttccctgccgccgatgacggtgtgcaccacaataatgctagcgccctttccaaggtccaaggcagagctttcatctgcggcaccacacctgggccactccctcaagcatctcagctgcccattggaatgagcagcactggcccagttttctagtcaaggaccagaggagggacggcagaaggggcttggtggcggagctgggactctgagcccagcccatgctcctccctggctccacgtctctgccagacaccaccgcttgttcttgttaattccagaatggaggagtaggtcatgtctcagggcacgagagtcagccgccccccagggaaaagtgggtcgggggaagtctgtgctgagtgccccccgccaacacttttgtcccctctctgggctccttaccctcctcccaggcatcttcactgccatctctccaacctcagaggacagacatcataacccatcaatatgaggctgaaagctgccagaaactttcttccaggaggatttgtctcttagaaaagaagggaggaggatggggtgagaggaaagggcacttttgtgcctttgtcctctctttctggaaggccccgccccagctcccctctttgaccccactctgagctcctcctttgacctatatctcactgtgctgttacagttcgggggacatgtttcttcctttttgtcccagatactaagcctctttgggccacggtggggccccaggagccaacagacattcttcagggcacttgggtctttttgttaagggacagggtcttgctctgtcacccaggctggagtccagtggtgcaatcacagctcactggagcctcaaactcctgggctcaaatgatcctcccacctcagccatctgtgtagctggggccacaggcgcacgccaccacacccagctaatttttaaaattttttgtggagatggggtcttgctgtgtttccaggctggtcttgagtccctagcctcagtcaatcctcctgccttggcctcccaaagtgtcaggattacagacaggagccaccgcgcctggatgggacttgggtcttgacttttttttgccacttattaactgtccgctgtccaatcttaagcaatacacaacaccatcttgttcttggtttcctcattagtaaaatgggagaatagactggaaggattttaagatttgttttagccctaaagatgatgaatgcattcagaaatcctggagaaagagttttggaacagagaacttaaggctaagattcttcactgttgtcatgatgatattgaccctgtcaagatttcacagactgcagcttgaataaatgcttccagtagtgacgctcgaggctgtacagatgtttctgtttgacaccgaaacactgcattcttgtctgtatggcttttggctatagcaattggaagggcttctgtagggccactctggcttattattatgaggaaataaaatcttgaattataaataaaggaaataaaaatacattaaaaatgaagacttcaaaaaattgtactggggcagggcacagtgattcatgcctgtaattccagtactttggaaggctaatgtgggaggattgcttgagcccaggggttcgagaccagtctgggcaacataatgagaccttgtctctacaaaaaattttttaaaaaattagccaggcacggtggcacatgcctgtggtcccagctactcaggaggctaaggtgggaggatcacttgagcctgggaggtcaaggctgcagtgagcctgattgcactactgcactccagcctgaatgacagtgagaccttgtctaaaaaaaaatctacggaaagaattgtttatttactggtacagcgtgtcgagtgatacagatgccaagttcaatcccattggaaggtggtaagcagcatcgtcagtgatgcaagcactgtggaacaaatggttggcctcccccagatgcctttattgtgttacctactcacagcttggcagtgagctcatatgtatatctccatcatatatgacagggccctaatttgtagttacttacagtacagtcaattggataagacaacccttatattttattatgatattttttgttgtcttgtgagtttgttttgttaccctggctggagtgcagtggcacaatctcggctcactgcaacccccgcctccagggctcaagtgatcctcccacctcagcctcccaagtagctggagactataggcatgcaccaccatgcccggataatttttgtattttttgtagagaaggggtttcgccatgtcaccaaggctggtctcgaactcctggactcaagcaatcccccgacctcggcctcccaaagtgctgagatggcaagactgagccactgcttccagctgttatgttgtttcctaagaagcacagctctccacttctcctaagcaatgaaccggtgcctgtcagcacattgggccgcacagtggagtagaggctgggctgggagatattctagcatgtttgagaaaatgagccaggaggagtgggctccagcccaaccccagtggccagtggctgaccctgccctctccactcccaggtcatccactgcagtggctacttgaagatcaggcagtatatgctggacatgtccctgtacgactcctgctaccagattgtggggctggtggccgtgggccagtcgctgccacccagtgccatcaccgagatcaagctgtacagtaacatgttcatgttcagggccagccttgacctgaagctgatattcctggattccaggtgagttcggcacctgccacagtggctgtggccttctggaagacaccggtggtggaaatgggtccctgaaagctgccatcttggccaaatcataacaaggaataagtcataataggaatgtggattaagcaaaaccaatttatgaactgaaagaacatatgtcagccttaggactcaagggcttgttttactttatttacttattgatttacttattttatttacttattgattacttattttatttacttattgattacttgttttattttatttacttatttgaatcactagagtttgaaatgaaaacatgggctgtgagcacaggttgggcttttttgaaggccatgatgtcagagctctgcctcctgcgtccaaggaggactttagaacaaacagaaaatttccaccctgtgtgcggtgtgtggggggccttggcactcaggctggtgtgaagccaccacagggctgaggctgggagcagagacgctatctaccctgggggatgctcttcccacagctcatgggtgccctgtctacatctgggctgggaggaggggattggatgaggtcatttctcctggccttggggagtacctctctccagacccgtgctggagtggccttcactctcccctagaaccggctgcagtcccagttttttaactgagtctgcagttaaagtctgagttttttaaaattgaagtgaattttaattttaattaattaatttttttgagacagagttccgctcttttgcccaggctggaatgcaatggtgcgatctcagctcactgcaacctctgcctcacaggttcaagcgattctgcctcagcctcccaagtagctgggattccaggcacccaccaccatgcccagttaatttttgtatttttagtagagatgcggtttcactatgttggccaggctggtcttgaactcctgacctcaggtgatccgcccgcctcagcctcccaaagtgctgggattccaggagtgaaccactgtgcccagcctaaaactgaattgaatttttaagtgacaaacgctaactgcgtttggttttcagggttttgtggtgtttgtggggtacattgtgatgctttgacacatgtccactctgtggaaccatcaaacccctcccaagtcttgaggccacgtgctagtcaggcctcttccatgttcttatttgtaaaacagcagcgcagcctgcccactcactgctaggaaagatgagattagataatagacggaagcattggaaacagtgaagcctctcttacctgcaaggccactttagctcttggcaggtaggttcctcagctgtgcagtcgggaataagccatcagagaccccgctcctggcgtggggtgtgtgtgtgcgatgagtctttggcggggggaggagagatacattttgctttctgtatgtccagaagccaggatttactgttttcttttctttttcactttttaaagttgtggtaaaatacacatcacataaaattgatcattttaaccatttattgatgttctatagagaaaaaacagatcttcctggttaggggcaagagataaagacaggagtcagtttggctccttgtcgacacccttcaggaccactcagaagcagggtgagtgtgtcagggtcaccagcatcttcccagaaactccaagcagacaggaaacagcgctctttggggaaagctgccagcacctctggggacggccaagagcgacaaatgccattttcctgccatgcagagggaggcgctgcagggagagaaggcagccaagctgccccagccagggtggacccctctgctccctcttttctgacttgggagccacttctgagaggtggctggaaggacatcagctgcccaaagtcattatcagagacatctaggaggatccaactggtttcccccttgtttcgtctcctagttttcctctgggccttctaggaaacccctgagactgatgaattctggagaacaggaaagaagtggtctccccagaggagagacctgagggcttttcaagccgttcaatccacattgcctggaaaggcagccaagggtagaggaggttgtgcctaaaggaggcctggacagggcctggatggggctttgcagcgccagagggggctcccgcgtctcagggtgtaggggctgcacccctggagtgaacagaaaagaaggctggtggtcttgaaggagacatcctgcctctcccagatctctggttgttcctgccatatcaggaaacttctagcaaagccttgaggccttttctgagctgcagtcacatgggaggggctgaaaggggtcagaagaatgctgcagaggccttcccagtcaccacagtcagtctgtgaccaaggggatggggcctgggctggcccagccctgggaggacagcagagtggccaagcagggtgggagatgtcccttctgagtccaaaccccagaagccagacgagggctttgcccgaagtccagcggccccaagtcacaggagcgagggtggtcgtgggcctgtctggcgccacaccccgcacaatcccagacacaactgaactcgccgtaacctgaaattgggtttgtcagggttttgtggtatttctctttgaaactggagctgatgcttttgctaaggatgggtgaacacagcgatgtttggggtttggcagattcctctgacaggtcttcagacactagaggcttggaaaaaaccgggagggcaccttgccaaacccctccatttccctttaatttttaaagccagtgtgtactttgatgagaaacttaatacatgtgtttctgattcatttacacgtttggggccgttgttctgtaactttgcatccaaagggtctgggaagcctctttcatccccacacggtagagatgcctggttttctttttgggggaaaacagacggctcaattttcctgccacacagagttagattctgatggggcttgaagttctaggtggcccttaggcaagttccctgagccccgaatggctctgggctctacaaggccccctccccgcatccctctcccccaccactgcaagccctgtctccttcctaccctagaaggacaccatggaaatgagtacaccaaacagggaacaattccagggaaacatgaggctctccgagatttacgacccaaagcttgagcagatcttaacagaaagggaagcgggttaaagaatgaaagtgaggtcaagtttttcagtttaatttacagctaacgtctcctatcctagcaaggagggcccccagccccagccctccctctttccccgacctcacccggcccccaggactgactgcaccatagcctcgcctgccttggaatcccttcatccctctctctttcatctgttcttgaaaatctatcaccaagatggtgaggaccacctccttcgaggacatggtgcccggccccattgcccaaagcctgggaaaccatcgttgccacgtgcagcttccacctacggccagagcgatcctgatgcgggtgatgatgtggtcttgggtactgagagccacttttcttcaaagagccgaagtgggaaattaatatgcccagggctcgatgagaacacaaaggggttgtgtcacataagccccaggaaaatgcttccatttctctagagagcttaaggctttccttttagtcacaatatcttagggcgttatcctgtcttctggggggtctgaaccaatcctcccctcataggagcctaaaggtccccagttattccgtaattcccaatagtgggaatcacccagcggcagcatcctgagaccatctgtgccaatcaacagtgtctagcgtgcaacagaggtttaaacactcgcacccgcagtagccaagatgtgcaaacaactgtccacagacagagggatggaggaaccaaatgtggtgtctacataaaacagaaacgtattcagtcctaagaaggaatgaagttcagacacatgcctcagcatggatagccttggaaacatcatgctgagtgaaagaagccacacaccaaaggccacatggtgtgccattgcacggatatgaactttctcgaagagaaaaattcctagagacagaaagtacaagggaggctactgggggctgggcaggggacagtggggagctggtgtttaatggggacagagtgtttgggatcatggaaagctctggacaggggcagtgatgcctgttacacaacactgtgagtgcaccaaataccactgaattgtacactagcgctggtaaccatggtgaattgtatatgtatattttaccacaatttataaaaaacattcacacaggaccgtccccccgaagccctccaagagtgggttctttctcaccgtagcagctttctcgcaatatcagtatcaaagtccacttgtaagcattccccgataagctgaacttggaaaaaggctacaattttaagccattccaaacattctcttagccggtggtttcagaagaacattcccattcatgaatagtgctacatcctgcaccgggctcgagttcaaagacttgcttcttgtaaaaaagatcattctcagtttccaaaatcaacatttcccgcctgagccttttagcacttgattagttggcaaaaccaatattagtttaaatgaaaggcagtctgcagagtggcgtaactcactgagctgccatgcccccacagggtgaccgaggtgacggggtacgagccgcaggacctgatcgagaagaccctataccatcacgtgcacggctgcgacgtgttccacctccgctacgcacaccacctccgtgagtagcacgcccaccccagccacgggaggtagctggtcagggaggaggcgctgaggacagagccgggggacgtgtcccttttgttggtgcaataatcatccatgatacacacttgaatctcaagccccaagtgtggcttcctccaccccgtgattaagtacggctgcctgttgtcggttctcaagcagccacgcgcaccctttcagggagactctagcaggtgtaggatcaggaagttgcctggattctagattgtggatgtggaacctaaactctgtgatctggacaccatttgcgaataacagcaacagtggaagactgctagttatggagctcttactgctgtcgggcactaagtttaagtgactaaatacattaccagcccagtgagggagggtctcactgtcatgatcctcattttaccagtgaggatgctgaggtccagataggttaagccgcttgcccaccttcatacagctggatggtagcggagttggaagctgaacccacgcagagccctgcctccgactgctataccccagccagctaggggaagcccagggaggccaccattccacgatgggagaggtcatcttgggacggggtgaacaaacaccaatttgatttgccaacggaggcggtttgggaacatcaggatatagaggcggatgctctagtcactgaaatgtttaaagaagtgacacttttcttttacttttttaaaatctaaaaaaaaaaatctttttgagacagagtcttgttctgttgcccaggctggagtgcagtggcatgaacttggctcactgcaacctccgcctcctgggttcaagcaattctcctgcttcagcctcccaagtagctgggattataggtgcatgccaccacgcctggctaatctttgtatttttagtagagacggggtttcaccatgttggccaggctgatctcgaactcctgacctcaggtgatccatttgtctccgcctcccaaagtgctgggattacaggcatgagccaccgcacccagccacacactttcagaatccaaatggaggcaaagactaatttggatggagtggaatgcctcatcctcctgctgtccagccctgccacgcccatggccagtcgggggtgctttataatggggtgcagacagttagaggagctgggtcttctgcagtgtggcccagatggcatgtcctctgttcttgctctgccttctgttggctcagggacgttagaggacaggttgccagtgtcgagtgggagggggacggcaggcccgcaggccgctaggtccacagatgcgtggtgtgctgggctccgtgtggactgggacccgggaactcgatactcccagggtgtcgctgttgctcttccctccccaaatctctatggacagaaacccgtgacaaccaggacttatggctgagcaggcacagacggcttcttccttgctccttgactcatgtggagacttggaggtgtgaacaacccttttgtgtcttttgttaaagaccaaatcatgatctcataaccatctctgtcattctggagaccaagcttggtagagaagcagctgcttagtgttcggatggaacttctccgtcggtgtcactaatatgggagctagaaagttttcttgagcaaactgggtatggtgtgtcaattctagaatcagatatccaggagacttgatcaggcgggtgtgaagagcagagtggaggggctctgcagtagcaagagcagttgggagacgggagaggcatttgcctcgagggcatagagctgtgctgtgccctagaacagtctgggacttggagagtgaaggtgagggctcatacctccacacgctccccctgccactgttggggcggaggggctgaccagctgttctaagggaaagccccagccctggggggtctggagcccccttccatggaggcaggagaatgctggggagtttaaagcatacccccgaattacagcaagagaagacttgctcttcacagcgggctgaaaggcaggaaattaggcctctaagcacagagacaaaactgagggaatcaaaaatctctttttttttaatgagatggagtctcgctctgttgcccaggctggagtgcagtggcatgatctcagctcactgcagcctctgcctcctgggttcaagcaattctcgtgtctcagcctcccaagtagctgggattacaggtgcccaccaccacgcctggctaatttttttagttttaatacagacagggttttgccatgttgagcaggctggtcttgaactcctgacctcaagtgggactacgggtgtgagccactgcacctagacaaaagtcttctttttaaataccatgtcttttatctcacactgcctggctaacccaggaagcagggatttttttttttttttttcagacagagtcttgctctgtcacccaagctggagtgcagtggtgcgatctcggctcactgcaagctcctcttcccgggttcatgccattgccctgcctcagcctcccaagtagctgggactacaggcgcccgccagcaagcctggctaattttttttgtatttttagtagagacggggtttcaccgtgttagccaggatggtctcaatctcctgacctcgtgatccgcccgcctcggcctcccatagtgctgggattacaggcgtgagccaccatgcccggcccgaagcagggatttttttccccatttgctttggaacagtcatgaagcccacagtggtgctcagtcagtgcctcctctgtgtccatcatgggtagatgctttcacttatagactctgacctgcgggcagtttggggagctgtgtccctctcgtgcccttttcccaggtgatcagggtgagactcaggggacacttgtccaagggcagcagtggagctggggcaggaccaaagtccagcccattggctgtcgtgctgtcagccgtcaccaccacaccacaccacaccacggggcttaaccttggagatgtgggctggtggctgttctgtaggatcccagccctcctgagcttgcctggctcaccagacccacaaggtgattttatttgaggggtcttctgtggtttatatgatgaagccactttatctcacaggaagtttccagatattgaagttgtccaaggggactctgaaagggcaagcaggcacaggctcaaaaaggtaggcgtgtttagaaattagacggggcatggctttcttttccaaatgagccagaattggtaattcaaagaaaacagaaaatagcaagattgacagtgattgctactgtcctgtgactctgaccttagctgtgctagagaaacaaccagaaaagactgcaccccagccaggccggtgggttggtgtggtcttggagttcaccatgagtgtgcctgcctcagtttcccctggcagctttgagagggaggggaagcaaggatagtctcagatgatggggagttctttggttccagcgtgggaaccacctgcagggctgagcagcagcctcccctcagagcactcaactggaatgtcacacgcctctccaaagctagaactctctgggaagacagtcaactcccaagcagggtcttcagagtcggggtcttcatggtatggagctttgtgattgtggaggcctcactctccttcccaggtacagaacctgggccagaggggccaaccccaggcctcctgttcctgcctctccatccccagggctgggtggcacctgtttgatttcctgaaactccagaagctgccccagagcctggagttgaagtgcaatggttgatttggacagtgactagacatggccaggggaggagtgagccagagaagagaaggagccacaaagggtgttgtccactggctacagccgagggaggctggcgctcaacgccggggataccccagagccagtgtcatcaagcagaggggagagtgagctgaggtattgatacccctgtgcctgtcagtcagtagctggagggcagctctcagggggccttgattgcctggcttacccccaacatggtcagggtgggccctgccaaagaaaggcctcagtgggggagaacaggtcaggccagtggatgtggctgggccagagcaaggctgatgtcttcacagcctgtcgtcagcttcctccctgctgggccttcatccaggctgtgttaagatgttctctgttctaaccttccacaagtttctcccttccgagccctgtctgtcatctttcccttgtccacagaggccacgcctctctctgggggtccctgttggctgacaggagcgtccttacacccacaccactgctgtgtgagggctgagggaagcccatcccccacactctccagctctgtctccactcctggctttgtaccaatagctgctgctctcctcttggggacatgtgccccactgctgcttggccccacagagtcccaaccaagggacctcaggtctggacgatgcttttgtcttgtggtgtttgggtcctgatggggacttggggactgtcttagtgtcccaggcacaattcagccctcaactaggtcattccttaatatgtccgtatcctcactcaagttgtggggagaggcccttcccatattatagctgcagaggccgacttggggaggacaggggagaagctgagaaggtgggaggccccattttgaaatgggacttgttagtcctgtcacacagtgctttggtggctgacagcccggctcagggcctggcttgagggaagggcagtgaggccagacttcctattcagcctcctgccctcccaggttccaccagggtccccactgtggccactgcagacctgagactcaagtctttcaactccatcagctagagctggccccgtggctgcccgagggatgcggggacacaggcagcctgccagcttcccttccatctgccacaaccgagtgtagctggaggtagccagcagtgacagcaacccccgcccgggcccctcaggactcctcacagtgagatgcccagacgcatctgtcgtgggcagtgggtgaggtcaccgagagcaggaacaaagcagacagctgccaacagccaggacccgagtgaggtcactgtcccctcttctggggcctcgctttccccacaccggtagccaaaagccaggaacctctggggtcagtgccaagggctctgcagaggcctgattggaggtaagaggtggtggtccgggagggccagacagcccgatggtttgcacacgttcttcagaatattatcttcactgggagcaagagtccacaggggctgaagaaatcgcagcccctaaagagaaagaactcccagcctccagaaacttgagctttgtgaggaagagcagggccagcagcacaggctttggggagcacaggtttgcagaggtcaggcgagggggcacctcggaccagagaagggggcatgcgggcgtcatgtcggtgtggtctgggtgtcaccaggtgagtctgtgaagtcagagctgtgccacaatattccccagaactaacttccttcccttccttccctccttcccttccctttcctttcctccctccctccctttcttctttctttcttttccttctttctttttctttctgtctttcctccctccctccctttcttctttctttctctttcttttctttctttctttttctttctttctttcttccttccttttctttttctttctttttctttcgttctttctctctctttcttcatttttattttttagagacagggtctcactctgtcacccagtctggaatacagtagcgtggtcggagctcactctaaccttgaacttctggcctgaagtgatcctcctgcctcagcctcctgagtagctgggactacaggcatgtaccaccatacccagcgaatttttaaatgtttttggtaaagatggggtcttgctatgttgcccaggctgggcttaagctcctgtgttcaagtgatcctcccatcttgacctcccaaagtgttgggattacaggcatgagccaccatacccggccccagaacattctgtaaagaaaagtgaacacgggatcatcataaatggaaccactgtgaccctcccaccccacgcctcacccaccacctgaggtggctgattaaaggcaccatgctccagcctggcctcaggaaagccgagctctgcctccccgctttctttgtttcatgtttgggagactttttcttgtatgtagggggagctggcaaaggcttgtgatctgttgacccagaccctcagggggggctgagcacagcctggtccataggtggagaagggatcagtgtcagtaaacctgacagtttgtgtcatgggacactgggctgtccatggtttggaagaaccgtgatgtccacatggctattcttccaaggttgttgagaatttcacccggctctctaggtaggctcctgcccagaatgggccaagcccagaccacaaagagaacacaggccatgtgcagctattaaaacatttcaatgtccactttgggaggccaaggcgggcgggtcacttggggtcaggagtttgagaccagcctggccaacatggtgaaaccccgtctctactaaacaatacaaaacttagccgggcgtggtggcattcgcctgtaatcccagctattcaggagtctgaggcagggagaatctcttgaacccaggagacggaggttgcagtgagccgagattgtaccactgcactccagcctgggcaaaagagcaagaccctgtctcaaaaaaaaaaaaaaaaaaaaagcaaaaaaaaagcaaaaagaaaaaagcatggggccatattcctaagggcttgaatagattttgaggttgaagagcttagcgagcactagtcctcttgaaatccgtggatggatcctcagtctgagcctgctgcatctcttggttattttggaccataaacaaattggccaagtctcccttaaaaggtgagcccacctcacccccatacgtattattcaatgtattactttgaaagtaatagcagccagatgcggtggctcacgcctgtaatcccagaactttgggaggccaaggcaggcagatcatgaggtcaggagttagagaccagcctggccaacatagtgaaaccccgtctctactaaactacaaaaaattagccgggtgtggtcgtgggtgcctgtaatcccagctactcgggaggctgaggcaggagaatcacttgaacctgggaggcggaggttgcagtgagctgagctcatgccactgcactccagcctgggtggcaaagccaagactccgtctccaaaaaaaaagtaatggcaaaaatcgcaagtacttctataccaacctaatagctatagagaactttccagaggccgctgctccctcctcccacagctgccactttgaggacacctgggctggactccagctgtgccctcaagctctgttggccccggtttcctggtgctgcccacctcccacctcccactgttgtagtgggggtagaatgaggcaatcctgtgaaatgagctggaagtagacaccatgtatcttttcattagagaagcaaacccccaaaggagaagcattgtcaggcttctctctttgccatggcctttgcctatacccttgagcagtgatctgagtcggctgagatgcagatgttaagcctgggcagaaaagcgctgctctctgcatggtccgggagagacccctctccagccggtggcatgctcgttacgcaacactgcctcatgtccccaggttcatcctgacggggtggtggggcttgatggagactggattcctgcctcccaacccccacaatcttctctcccatgtaaaaaacaaaaccatttcattctggttaaacctcctcctcgttggaaatttagaaagtcaaggaaagctgaaaagaagaaagtgaaaattatctgtcattttcagtcagataaaagttaatatgtattgagcccttcagctgtgtctgccagtgttctaaatcctcaaatagatcatctaatctttcaacaaccatatgaagtaaggactgattatcctttttttataaatgaggaaattgagtcacaggggggttggtagctagtctaggatcacacagtttgttggagggggtagtgtatgcacgtgcccactttttcataattagggttatactttacacatttctgaatcttgtcttttcttctgttaacattgtatcacacatttcccataatataacaatttcttattaatcatcattttaatggctgcatagtttgccataatgtatttactcttttccctaccgttgaagagttaagtctctccccaccccttttccctgaattttcagcaatattgcaatgaaaccctttgtaggtaagtctgtgtttgcacacacagacctgctcacaatttccataggatcaattcctagaagtgagatcagtgtgtcagagggtgtgagctatcagactgctttccaccaactcatccttccatcacacatgaaaatgcctctcactgggccaggcgccgtggctcacacctgcaatggctgcatagtttgccataatggcaaactatgggagggcaaggtaggcggaccacttgaggtcaggagtttgagaccagcctggccaacctggcaaaactggggaggctgaggcaggagaattgcttgaacccaggaggcaggtttcagtgagatcatgccactgcactccagcctgagcaacacagagagactctgtctcaaaaaaaaaaaaagagaaagaagagaagaaagaaagaaagagagaaagaaagaaagaaagaaagaaagaaagaaagaaagaaagaaagaaagagaaaatgccactcaccatagattagccggtgtcacctgttggcctttcatttttttttttttttagataaaattcacctttctcaccattttcagtgttttttagttatattcacagtgttgaacaactatcacctttaattccagaacgttttcatcatcccaaaaggagcctgtcaccccagtccccctcgtgcttcagcccctggcacccactcatttgtttttggactctgtggatgtgcctattctggaagtttcatgtaaagggaatcatacaatgtttgtttctattttaatgtctgttgatctgatggatggatctgcctttgagttaaacaagggagttgggcatttgttcatcattttgcccattatatttattctttgatctttgcctatattgcttttagggtctttgtgtttttatcaatctgtacgaaccccctatatattaaggtgaataactccgtgcagcattttcttttgcaccaaaatattttgatgtggatgagaaagagccatctgcaaggtgaaaaggaaccgtaaagggccacagacagcccaggagtgtttgggcagagactgggggctttgcccagcggtatgacaggaaggctgaatttttgttgcatatgagcctcaaaggctgaatttttgttggaaatgcaccttggggagtttccttcagccccagctggtacagtcacagactcagcccctttggccacctccccagatctctgctcaggcagctgctagttaggtccaggggccagtcctgccttgagaagcaggaatgttctggagctgaggacccagacatccaagggtgtctttctagacttgtgctatcctcctcttccctggagaagcttcacctctccactgcccacctgcgggttctggcactttcctcccccacctgcctcctggaaggcggtgaggtggaattgtggtttatgggtgcaccgagcctttggctgagctgcttagcggcctggagtttgcacccaagcatagaagacaggcccataggcccaattttcaggaactctgcagccaagtagaggtctttcctacataaacaacatagcaaattaatgggcccaaggaaaactgggattaatgggaagaaaatataaatggcaacaaacagtttcactgtgaataccctcatgttcctgaacagcaaacatcagcaacagcttgacacttggttgaatgcacttaactgactactttgtgtaaataactacatcactcaccccccctccccattaaggatttggggattaaaacataattgtggcattttgaaaactaaaaagcagattgaattttttcattctgccagatacaaactttggtggctaatgtttccctcaatgaaagcaatgactgttaaataagagttcttaatgggtgggaactccttgaagctgaaggcaaaattcctgtgtgcacatgtatatgcacgcgtgtgtgtgtgtgcacgcacgagacgcacacagacatgcaccctccagcggagaaagcccgccccctttgtcaagttctcagaggtgtccttgggacagaggtcaccgttgggggcagcatcccagaggtggggcctgcgaagcgtctgaggactcctgtcaccttgtgcttgcagtgttggtgaagggccaggtcaccaccaagtactaccggctgctgtccaagcggggcggctgggtgtgggtgcagagctacgccaccgtggtgcacaacagccgctcgtcccggccccactgcatcgtgagtgtcaattatgtactcacgtaagtcacacgtatttgtttctctccttgctcttttctcttccctgtcccacatcggatggctccaataagcaccatctctctttctctctttctcaaactgttcatttgtcttctgttttttttcttttttttaattttttttttttaggaatctggtcattttggaaggtgcaaactatttctatgctcagcggtgaaagccaagtgctaggctgcagggggagccaggaggagggggcctgccctgggcatagcttcggatcccatcacagaacctagtgaggagcatgggggcggatggtgatgccccccatcctgaatagggtgcaaagagggtgcacaccccccatcaagaatataaacttgtgctatccatgcctataagcctttaggtcatcttagatgctcctgctgtttgagacaggaaatatcccattttttacctgtcttcttatagagcctgttacaaattaatcatggtgaatatttggtcctttaaacactccagaaggtcaagttcagtcgcaaatgcctttttttttttgtaaattaaaaaaaaatatgtttttgtagagacggggttttgctatgttgcccaggagctggtctcgaactcctggcttcaagtgatcctcccacctcggcctcccaaagtgctggaattacaggcatgagccacggtgcccagcctgcaaatacttttaaggccattagaagcaataggacagatgtctatctggggccatatattactttccacccaccatagctattgtacgttcaatcaccttgctccaggctgtgacccttgccatgccgccagccccatgatgaaaagagttctcgtttgcactttacatggggtgaggatttaggctctaggtttgttcatagaatgactgtgtcttagaagtcaagtgattctgacaaaactgtcagggagaaaacagtttagccctttagttattcttcctgagcaaatgtgtgggctggttctccaggtcgacctctccttgtgtgaacatgaccctgctgagttggttctttagggcagagatgggcccccgatgtgagaatgcacaaagctggtggtcaggctcccagacctgtgaagagtcccggactcttgcctcctggggtgctaactggagaggcagctgggccacaggtgtgcatgttggatgcaggtggacctgatcaatggtatttctgcctgtctctttttcccttggtggctttcctcatggcccacgacctccccgagcaatgtgtttggggttttattggactggagagagctctgacctggctcagcatttcctggggtggcccagcctggggctgcagatggcttttataatgagggtgagctggccttgtctcaaatcccatccacatccaatcccagtgaaaagacacactggagcactgagaacgccctgcccaagggctggggccagggaagctgctcggcctccagcgcctgctggacatgactcggcccactctcgccttccagggagattgaatacaaggaacttcagctgtccctggagcaggtgtccactgccaagtcccaggactcctggaggaccgccttgtctacctcacaagaaactaggaaattagtgaaacccaaaaataccaagatgaagacaaagctgagaacaaacccttaccccccacaggtaacacgcatgtcctgcagttttggggtgctgacatctatcctaggggttcgggacacctggacacattaaggaatggggagcctctcattgcacagcagggatctccctgccgtggagcaaggtccctctgggatgtcttgcctacacagtagtgacagcccggggaaggccgacatcccggtgggctagtcaagtttaggaaacagaagactaaattggaaaggcacttcagcccactagaatccatgggttagattctaatgggcttgacgggttggaatccacgggttagattctagactggtgggttagaataccagtccattgtatttctgcagcattttaaaaatgaaagccctccctctttttaaaaaagtagtttgtgagctctcagaaatagcaattgtcggttgggcgtggtggcccatgcctgtaataccagcactttgggaggccgaggcaggtggatcacctgaggtcaggagtttgagtccagcctggccaacatggtgatactccatctctattaaaaatacaaaacttcgcgcctgtagtcccagctactcaggaggctgagacagggaaatcgcttgaacccgggaggtggaggttgcagtgagctgagacagtgccactgcactccagcctgggtgacagagcaagactccatcacttgttctgtgccaagtgaactttggtaatgtggtcattagcagatagaccagttgaacgtcacggcctccacattatgacaaaaaaaaaaaaaaaaagaaagaaggaaaagaaaggaagggagggagggagggaaggaaagacggaaggaaggaaggaagggaaggaaggaagaaaagaaaaaagaaataaagaaagaaagaaaaacaaagaaagaaagagaaagaaggaaaaagagaaagaaagaaagaaagaaagagtccatgtgtgcctgatgtcttgttagcttggggtgggggatctctttccaccctgggagcaggtcactggggtatcgctcgctgtgtgcctgtccccagtgggaccttgcagtggtggcgagggtaggggcagcccttggatggggttgggccccgtcgggacggttcttgcagggccggaaggcagcttcctgccggcccctcgctggcccttcatccatcttctttgccatgcagcaatacagctcgttccaaatggacaaactggaatgcggccagctcggaaactggagagccagtccccctgcaagcgctgctgctcctccagaactgcagccccactcagaaagcagtgaccttctgtacacgccatcctacagcctgcccttctcctaccattacggacacttccctctggactctcacgtcttcagcagcaaaaagccaatgttgccggccaagttcgggcagccccaaggatccccttgtgaggtggcacgctttttcctgagcacactgccagccagcggtgaatgccagtggcattatgccaaccccctagtgcctagcagctcgtctccagctaaaaatcctccagagccaccggcgaacactgctaggcacagcctggtgccaagctacgaaggtgggtcaggtctgctcgtggggaaggtgggaggactgcgcacggccgggagccgaagcagccatggcggtgggtggcagatggagacagaaccctcacgctttgggcaaacttgccctctttctgcttctaagtagggcttgctgtgctttcttgctctcaatgcaggtgctcctcgagagtgagaaatggcagtctgcctgcctcggggacactagtgacagtataaagggcaaaggaaaaccgagtatctggccttcacgtaaatcctggccacattcaccaaccaaagggggacagtgattttcaaaaccagctcccatgtgctgagaacaccccagctgcatttcttttgcaagattcctttccactccaaccagaagtgaatatttgagacaaacggcctattggctattttcccatgccagttttggaagtggggaaaactatggtggaaatttgtgggcttggggacagaaatgccactcaccaacccagggcaaagaacacaaaccctccaggcctcagtttcttcacctgtaaaatggggtgaagctgtgatgtgcctactcccaaggacacgacacacagtagggacctgccctgtacatgctagttcaacagaaaggaatggcctttcaccttctcctggtggcaggcaagcagatgtcctctgcggagataccgccagctccccaggacgcagactgactcctgtttgctcgctggaccaaccccaggcagaaggtggaaggtgggaacagaggtttagctgcaggacatgtattcccattgcaccgagacctaactgccgctcagagtgtagaccgagatggtgcagatgcctgcagtgccactaaaatgtgggtgaaggtgacatcaggattatgtgccccaggccgggctcagtggctcacacctgtaatcccagcactttgggaggccaaggtgggcggatcacctgaggtcaggagtttgcgacaagcctgccaacaagctgaaaccccatctccactaaaaatacaaaaattagttgggcatggtggtgagcacctgtaatcccagctactctggaggctgagataggaggatcacttgaacccgggaggtggaggttgcagtgagctaagatcacatcactgcactccagcctgggtaacagagtgagactgtctcaaaaaaaaaaaagaaaaagaaaaaggatgatgtgcctcagaaaagcagcacaccagcccctgcttaagaagacagctcttggaagttcctccacgcctctctcgaggcaggtagggctctgctccttctgggcctcatcctgctttttctgcaaatcctaggaatctcttgctctgtattgtgacttgaggctgagataacatttcttcccaaatctgagaagagagatagattacgggagaatgccgcctttctggaaatcactaggacatgttttttcagaagtagctaacttagaaaagaccacattggtgaccagggccaggacccctgccttttgacctggcctgtcccaggagccacggatcccttagatttgcatctgccatacccgtgaacatcttgggcccctcatataaccaaggaagggatctccagaacatccaagcaaaggaagacaaagcaaagggttttgataacagctgaaagtattacccacttgagattgacttgaatttgtgtgtcggaagctggctaatgctgtcacatggtatttgacttttaccactattttaaaagtgaaagaggttaacaatctccttatcacacacttgataaaaagtggaccaaaggtgctaatttgaggcaatttgcgatcagcttcctagtctttttggtattaaaggaagacaaattttgccatatagtgtttaaaaacaaacaaacaaacaaagacaaaaaaaacccacaagccagggagctacttaatgtcaggcatcggactgagtagatgggagtggttatttttcattatgacacggcgaaaccgatcggggtggttaccacccctctccactaagggacgggcagaagaaatcagagcagacgggggccctccaacaccagggcccctggtggcctctagacctctgccgtccaatcaggtagccaccaaccccgtgtggtcttgaacatggaaatgtggccagtgcagtgaggcaggtgtgacctgcgctctgcatctcaggaccaaaaaaaaaaaaaagaaaatatcccaataattgtttcacacggattccattgagagagtattttggatatgctgcattaacgtgtattacttaacaggcattccacctgtttccctgctttgtaacgcggctcctggaacatttcaggtcgcgtcctgagattggacagcacggcctagactaaggcgggggagggcgacagcgaccccgcgggtgcagcgcgtgggcggccgaggggtggtggctgcgcccggggcttgggggtggggtggctgcggccgcgccccttgctgccctctaacgtgtcgcctgtccccgcagcgcccgccgccgccgtgcgcaggttcggcgaggacaccgcgcccccgagcttcccgagctgcggccactaccgcgaggagcccgcgctgggcccggccaaagccgcccgccaggccgcccgggacggggcgcggctggcgctggcccgcgcggcacccgagtgctgcgcgcccccgacccccgaggccccgggcgcgccggcgcagctgcccttcgtgctgctcaactaccaccgcgtgctggcccggcgcggaccgctggggggcgccgcacccgccgcctccggcctggcctgcgctcccggcggccccgaggcggcgaccggcgcgctgcggctccggcacccgagccccgccgccacctccccgcccggcgcgcccctgccgcactacctgggcgcctcggtcatcatcaccaacgggaggtgacccgctggccgcccgcgccaggagcctggacccggcctcccggggctgcggcgccaccgagcccggcaaatgcgcacgacctacattaatttatgcagagacagctgtttgaattggaccccgccgccgacttgcggatttccaccgcggaggccccgcgcgccggtgccgagggccgaggagcgcccgggtccgggcaggtgaccgcccgcctctgtcctgcgagggccggtgcgacccagttgctgggggcttggtttcctcaccttgaaatcgggcttcacgcgtcttgccttgtccccaacgttccacaacagtcccgctgggggattgaagcggtttcactccgcaaatatcctccactttcaggagggaaaacccaccctaccacagtccgctcttccaagtggacggcagacctgggaggggacgcctgtgtcacgagcccttttagatgcttaggtgaaggcagaagtgatgattgtaagtcccatgaatacacaactccactgtctttaaaagtcattcaagagtctcattatttttgtttttatttaaccctttcttcaatacaaaaagccaacaaaccaagactaagggggtgaccatgcaattccattttgtgtctgtgaacataggtgtgcttcccaaatacattaacaagctcttacttccccctaacccctatgaactcttgataacaccaagagtagcaccttcagaatatattgaataggcattaaatgcaaaaatatatatgtagccagacagtttatgagaatgaccctgtcaagcttcattattacgtggcaaaatccctctggcccacacagatctgtaattcactaggctcgtgtttgctacaaatagtgctaataaagttaaattgcacgtgcaatacggaacactgtcaatggactgcaccttgtgaaggaaaaacatgcttaagggggtgtaatgaaaatgatgtagacattttaagcattttctacacagcgagaaaacttcgtaagaacatgttacgtgtgcaacaggtaaacagaaatcctttcataaagcaccagcagtgtttaaaaaatgagcttccattaatttttactttttatgggttttgcttaaagatctcaacatggaaaaatcctgtcatggctctgaactgcacaatgcattgaaccgccgtccttcaattttcttcacactatcaacactgcagcattttgctgctttatcaaaatggtttattttaggaaactttttccacctttctgaatggaaagaggttttcacaaatgttttaaactcatcgttctaaaatcaagtgcacctacaccaactgctctcaaaatgtgaactgacttttttttttttttttttgccaaccctgtgtcacttagtgaggacctgacacaatccctacagggtgtctgtcagtgggcctcatggtaagagtcacaatttgcaaatttaggaccgtgggtcatgcagcgaaggggctggatggtaggaagggatgtgcccgcctctccacgcactcagctatacctcattcacagctccttgtgagtgtgtgcacaggaaataagccgagggtattatttttttatgttcatgagtcttgtaattaaaccgtgattcttgaaaggtgtaggtttgattactaggagataccaccgacatttttcaataaagtactgcaaaatgcttttgtgtctaccttgttattaacttttggggctgtatttagtaaaaataaatcaaggctatcggagcagttcaataacaaaggttactgttgagaaaaaagaccctatcatagatttacaagtgacaacgtggacaggcgtaacagagtgtgtatgtacttgaaaatgtgtactagtgaaaacgtccttgtctaaacaaacttcgttttcataacctagaacatgaaggaagattcttacacgagctggcttcaggacggccagggctgagtgtgaagtcagcagagctgttactgtggcaacctaatattgtgacctccatcttgaagagtctgcacatttaagctggggatagcgtttcttgacttctgtgaggctccggcaggggaagaggaagcattttaatacatatgcctctcttttacaaaaaagaaaaaaaaatcatcgtaggccctaacatgtaccatgttgacaaaaatgccagatcaaatggatttgagaaataagcccaattcaaggctggctcagccctccacggggcctcccagggaaaggaattcctttatgttcttggaagcccttttctagaaaagccattccattcatacctttgtagagcagtgggctgggtgtggagggcagcgcggagggtatctgcaagagcctgtattttccgcctcccttgcccccactccttttatccttttaaaagtcctatcagccctgccttcgtcccttccgccctaagccctaagagtgggggaggtttaatacggccaatggatcttgtataaagtctacgtaagttttaatttaccagagctataagatggttaaggtagactagtggggactgctacagataaaatgagatacaaagaacatttgcaaataaatgccataaaattacagtagcttggaattttagtgaatcatggcccttgtgttatctagaatgctaattattcaagctgttcctaaacttaagtatgacatataagattaaaatcttggggggaaaaactgttcagatgaaaagtcaagtcaagaagtttccacaaaagaaaagaaaaatcctaaaaacaatctagctgttgttacattaaatttatttctcacctccattaaaagggtttttgctttggagttttgttaactttcgttctttggagtaataatatttctcttgtgtatggcgctgaatacatttgtcaataatacgtcaaaaaaaaaaacacttggcttcttaatacttggaaatacgtacatattccttactatgtaaaacactttatttattttgtaaaaatgtttaaatatgaataaaaatactgtaacccaaagtagttgcctacttttaaaaatgaaacttgtaaaaataagagggagcccaaaccacatagaaagtcttagtttattttggtagacttgctttttataggcattggtttaaagtgattcttttcagagacatcctttgagaagttaaaattgcagaggcttacgctttcttttatttcaaatatgcatagtgattaaccaggaataaggattctcccatgttctgcctgttaagagcaaacagatctggagaacggaagcccaccctgcctcccttttccatctgaagcagtgcggggaggctggctcctctctttgttcccagactccagggcaaggggcgaccatgctgtatatgctgtgccttgggggacccccagaggctgcgctctgtggcctgtgctcccccgacctgtgcacccgcaccccagtcggccacttgctctcacatcaggcaacgtcagcctgctgcagtgaaactcaaccacgattttcctttgcacacaaatccttcctacttccaccactccctagcagagttcccagtgccagagagcactgctggggtgggggtggggacaggaagcccagttattgctgtgttctattttagggggcacttcctcaagagtccccttgaaacccgttaccagcctggaagggaggatatcttgccttttacaaaatacggtcgatactcaatgcacagcctctaaaacaagggctactccagtgttctaaaagcacacgccaatcctgagtttagtgaccacattttaaagatcatcaggaaaatgccaagttcccattaagactttaaagctccttgagatcccaggttgcggggtgcataaatggcccaaatcggagagtgtgctatagcaggtagacaggtttcgctaacacgaacagctatcagtaaaatgcctttattcagctaattctatagaagcggagttttgagagtctttggttcatgtgaggcaaaatcaggtttatggaaaacgcagcatctgcttcaaggctgcttcatctctctcaggacaactgagtctcctgcgtgagggaggagcgcctgctggaaagcacagagcacagcagtatgcccggaacatctccatagcctttgacaaggccacacttcattagttttaatttgcagaaaggaaattaaatgataacattttttcccaaagcagagtgtccagaataggacttcagcttaaaacaaaacatagcatgtttttcattaaataacccccaaagaaattcaaaaagtgatgatggcagctctgagagagggcttgccttatattacaaagtctgagaaatgaaacctacatcgttagcctcgagatctttgtccctgatgatattctgcagatgccctctcaagggtaagtccattttgtaatttggggatggtgtggacttgtattttacttaagtttctaactaattttgaaagaaggcttgggcatttggagaagagtggttttttttgtgttttttgtttgtttgttttttgagaaaaataattctaattgaagcctcatttccaaaaattactttttaagttcttttaatgtttcatttccaaaaaatatatattgggtattttttcatagggctgtcctgtgcctggctaaaggtagacagactatactaaaaaccacaagtttctggaattagcctgactgggtaagacctggataaagatggtgctagtttacaatgaagggattttgttcaaagctgaaagctccatcaaactttctttccactaatttcagctgggactggaagagagaaaactggacaaaaattggccttttaaaaagctgaaaagtaatgagtatgattcataagttcaacagagataggagggacatggaaaaggcatggcgtacatctgggaatagcgaatgcatatcaaaaggcttcatttcttttgttctttcatgaggcttgtagcacatcaaattttgaatgtcttcttttaaagctatgtgcgcacacacgcacgcacacacatatgcgggcacacacacacatcctccctctgaactgatggtgtttagtatcgataacattttctttcttggtaatacgaggtaaatgaggggggcaaaaacttatgacttctgagtaaaatgccatgtcttctatattccgtgagctgcacagtcttgcaggaatgctccacatttcagagtaaatctgaaactggcttaaaagctccaaatcctcccttgtatgtggtatgagtgtgccttcatctccagctgtcagagccaaatcgcccacctcctcatccaagtgatgcctaatcagacatttaaggattctgaacttgatcctgtctcttcacaatatgtagtaaatttaaacttacttaagaaagtcagtccctaactaaggacatttaaacttccttaggaaaggagagctcactgaatgatgtcaaagtaatgaactgatttcctctacaaggtcactgcaaccacaccagctagctctatctctacaggcatttagacttcgctatggggccacaccaccgggtggacagtaactcttggaagtctgtcttcccttttcttcattaataaaaacacagaacaatgactaagtgtccaagcatgttcttacagttcagtacctccccagatgcttacaaacagtgatagcatacctctaactcaccactggcctgggcgcaagagcatattttggtttgttttttcatagactaggggtaaaggtctgcactactaagaaaatatctgaattttcccattgtcatttccatgtaaaaactccccttgacaataaacgtaagtccaagccacagaggggagagcaatttcccacctgtgggagggctttccctaaactaaattttctacttcttaaccatctatcccagagcctcttcaaacaccaaagaaaacgacaacaaaacaaacctaaaaacaaacagaaacacagaaaaagaacaaagacttaacaaatgaattggaggaaaagaaaattcacctacaactctaaattagatttccagatgcatgggcacggacaggcagccgcgtctcggggacgcccggcattaccgccgtttggggaggatgaggtttctcagcatgtcgaaggagttgccgtccgggtgcacagtcacaacctcgccgccctcctggtgaacctggaggaagccagaatcgtccaggccaacgatggacacctttggtccctctgcgctgcccagatggacttgctgaccactgaaaaggaagaacagcgtgcggtcactgggaggtgtcacaggacgacttaagacaatgagctgaagaataatccatgatgagagagctgggcgtgctggggagagggctgaggctcgctgcagggaaaaggcagcctgggctgagctctgactttcttccaccctggtgaatggttttaagaactgctcaaataaccagcaggatgcaagttcaacaaggagtcgaaatttcttcacacaacgtcactcctcctaattctggtcatctgcggtgatggctggaaccacttcctcacctcccagcgcttttaagaaacactgtgcaactctaggttttttggctgagattggaggaaaataggccgagttggcaaacaatgttttatcttataaaacaaagttggctcatatcagccacaagtgaaactcatcctgatcctacttcttttgaatattttccaaatgtactcaagtcacgtccttcttaacagctttcgaagtatagaattttctcaagtttttattttgaagaattttaaatctaaagaaaagctgaaagaatagtgcaacaaacctcatattctcttccattctcacaccaaatgaaaatattttctgtatttgctttctttcttcacacataaacacacacaagcacacatttttttttcctgcaacatataaagataagttgcagctgggtgtggtagctcatgtttgtaaccttagcactttgggaggccaaggtgggaggattgcttgaggccaggagttcaagaccagcctgggcaatatagtgagaccctgcctctacaaaaaaatttttttttaaattagcgggccgtgtggcacactcctattgtctcagctacttgggaggctgaggcaggaggatcatttgagcccgggagttcaaggtttcagtagtgagctatgatggcaccactgcactccagtgacagagcaagaccctctctaaaaaaaaaaaaagtgaaaataaaaaaagttttttaaaagctgcaggcattgtgacactttctgcttaaatactttatctcctgagaacaagaacctcccataaaattataatagcattaactatgaccactcaagaaagtctggatacaaacggtccatgttcacgtcattcccactgtccttttaatatcctttgtggctatttccctccatccaggatcacacacattacatttagatgtcatgcctctttcgtcttctctaatcccaaacaattctgccaccttcttttggtctaattgtttgtgcgcagacctgacatttttgcagggcacaggcctgttgttgtggaatcagtgagcggtcctcggacttcagctgcatgagaatccctggagtatctgttatgacacagggtgctgggcccagcccaggggtttctgatgcagtagcccctggttgaggctgaggctgcttcctgggatctcactttgagaaccactgttacctggaaggtttgacaatttagatgcgtctattgtttcctcacaattagaatcagattaaaccaatgttaaactctctcactatttcggttcttcccatcgcatcccaccaggaggcataagatgcccgtttgctccattacttgtgatgctaacttggtcaaggtggtgtccctgcagtttctctaacagagacacagaaaataatcattcagaccagtgctcggtccctcattttaagatactgaactacggccgggcgcggtggctcacacctgtaatcccagcactttgggaggccaaggcgggcagatcacaaggtcaggagatcgagaccatcctggctaacacggtgaaaccccacctccactaaaaatacaaaaaattagccgggtgtggcggcgggcacctgtagtcccagctactcaggtgactgagacgagagactgaggcaggagaatggcgtgaacccgggaggcggagcttgcagtgagccaagatcgtgccactgcactccagcctgggcgacagagtgagactccgtctcaaaaaaaaaaaaaaaaaaaaaaaaaaaagatacagaactactaagatactaataaaggagttgaaaagaatgaagatgagccagcactgacctgtggacccagtatcggtaataaaggggaaggacgctgttgggccctttgtcctgaaactctttgatcagtttctccagcacagtcacgactctggcgatgagataatcggctcttaagggcttcagttctgccttgtgttgtttattgtattctgtgatgaggtcgttgatgcagatggtagggttactgttagtcacattaaatccacagcctggacaaaaacaaacaattgagcagctcagcctgttgatggcatcacacattcctctctgccacatggaaaaagttacagtcttgactgtcaacttcctccttccttgtcctcatttcagatttcgtgtctctaaccacttgaagagtgacatgtatttctgtccatcttcctttttgtccttcttttattattcttgttcaagctaaaaccatctcaaccttactgcaaataaaaaggtgggaaaaaagaaagccacatttgattcaatttaattcaatagaagctattaaatatgggacaaaacgtatcagtgttgcctctgaaataagtggtctaccaagcattgtagctctgcactgagtccaggagagaataaaatctctggtttcttctcctgcttgaataacagatcccacgcttgaaaatagagttttattcaggacttgggaagtaaactctggactcagagatttcaaaccttggtcatggcataaccctagaaatgcatcttttaatactttattcttggaagtctttggtgctaaggttacgctgttggcaagacgccgactcatgttcagtggctttttgcagggtcctaaaccaaggcttcatgagagttaccagggatggtgtctgaataggcttatctgtgcagttacttaacaccactatcctctccaggcagagggcggtgtcttcagaaaagctggacttcagtgttcagcagggccctgaatcggcctgcgagaggtcttcagtaagaaatgaaatactgcaaaaactaagcagtaagaaaactaccatgttttcagtgactttaagaaaaaaaatccccaaaacattcgccacaggcagaacaatgccatttgtaacaacagccttcccggcaagtgtcctgccgtttccagtgtgaagggaaggattgactggtctcagattttaaaacaatatactggctattaaaatacaaagcaattgtcaattacctctggaaaaaaaacaagtaactacagcaacaggggcaggacttgcagttgctcacgtattcattcattcaatacatacaggatctgaagcacctactgaacgttcgtaaggcattaaatcaagtgctgtacagcactgaaaattctcccgtgttcagaaaactggaattcctaggaggagtagcaacactcactactggccacttaggctatgtccttctaaggaccggtgagcaccctgctggctgctctgaatccccaaagtcagagaccccatcctatggccttcagaattcaataaaagctatgggttctcaccataggaaaatgtttcattcccctactttattttttatttttatttatttattttttggagacggggtctcactccagttgcccagactggagtgcagtggagccctcatagcgcactgcagcctcaacctcctgagctcaggtgattttcccatctcagcctcctgagtagctaggactacaggcaggcaccaccacgcccagctaattttttgtatttttagtggagacagggtttcgccatgtcactcaggctggtctcgatctcctggactcaagcaatccacccacctcaggctcctgaagtgctgggattacaggcattgagccaccacacctggcctattttttatgttttatttttgaaacagggtctcactctgtcatccagaatggagtggagtggctcgatcaaagctcactgtagccttgaactcctgggctcaagtgatctacctgcctcagtctcgcaagtagctgggattatgagctcaagccactacgcctggccttcgcttaccccacgctgataacatttgttagctccctgaagccatccatgagcctgcttgtggcccctacctaggaatctctgcatcaactgcaattactcacttaaagataggaaatgggggagactgggcaagtggctcacgtctgtaatgccagcactctgggaggccgaggcgggcggatcatgagttcaggagtttgataccagcctggccaacatagtgaaaccctgtgtctactaaaaatacaaaaaaattagctgggtgtggtggcgggcacctgttctcccagctacttgggaggctgaggcaaggagaatcacttgaacctgggaggcggaggctgcagtgagccgagattgcaccactgcattccagcccgggcaacagtgctggactccatttcaaaaaaaaaaaaagataggaaatggagctttaagggtatgaagtagcttgcctagaataatattgccccttggtggcagagctggtaacacaggccttgtattccctggctggcacttgaaacacatggttacatgttttttgaccattgctggtttctgaacacagattaggttctactgccacagagtgaggctgatgactggacggccaggaacctaaggacttctgagattgcctctgaatccatcttcttgcctgatttggatgtgctaaggtgaaacagggattctttaccccgccttgaccagcatggagcttcttctgaaggttaaaatgatgccagctctttcatggcccaggaaggtcacgataagaatgcaagacaccaggagaactatttaggaaattaacttttctttttcttattacagaatagaacgttaaatgtttattttcaccatttcaaattcaatgagtagcaggagtgtggaaggatgtaggaacatacctgtttgatgtgataccactttggtggttcccgtggtcacacacagaaaatgctaaaccctgtgaagtgctttcgaccaatctctctgcatctataccctgctccaaaactacaagactcaaagtaacctcatatgataatctgctcctgccaatgtaggcatgcataaaccgtctttatttttattgttttattaatctaaaaatgctgggggaaaggtttttgaaacttaccaataagtatataaaatgtttctcccatgagtgttgagttaaccagaactccgccgatcttcatgaggtcactgtaataaatatcgttgggccacttcactcgtaagttgatatcctaaagggaaatctgcacattaattaagccgtcacaggacacaaggggcccaggcaagtcactgagctaagggaagataagcagaaaccaaggtaacatgggcctcgtcctctcctctttttcaggcagctaatcacttctttgggacaatccgatattgaagtgcctcttggggccaggaggtaaaagccctgaagaacacagttgacataaaccccagcattcttccccatcccccagcactgtttctcatcatccaaaaccctttctgaagatgcttaccttgtaaatgaagttcattatgtcagtatccaccaccaccaccaccatggagtagctaactaacgtgctagggccagagggtggggagagaatagtaatctcagggggcgtctcccttcaggaacccatgcttgagagacaaagatggccctgaattaaccaaggtcacaaaaggcaggtagaaatgtcttgagtagcaggcagtggccaggcgcgctggctcacacctgtaatcccagcactttgggaggctgaggcgggcggatcacaaggtcaggagttcgagaccagtctggccaacatagtgaaaccccatctctgctaaaaatacaaaaaattagctgggtgtggtggtgtgcatctgtaatcccagctacttgagaggctgaggcaggagaattgtgcgaacccgggaggcggaggttgcagcgagccgagatcgtgccactgcactccagcccaggtgacagggcgagactctgtctcaaaaaaaaaaaaaaaagaatgctgtgaagatgcagaggagaaattcaccttagcgaaagcctcgcagaactgctaatggtcatcttgggtaatggaactggacttgtcatgtggcctattgcctctgcgtcttgaatggtgtggcctgggggtgggggggctctccctgtcatcagcttacagaatggaccaacactggacagtgtctcgaacaaggccacccaggcctctgcctatccactgtgactctgaagttgggacacagagacggggctagccgagtgggtgtcagaaccaccaggtcttttagacctcgggctggcagccaggctgtgccatgtgtgggtaaaggaagcctgtctggagatgcaaggctggaagagaacattcagcaaaataaagctaagggagcagagagtagctgatggcctccaagggccacggggctggtcttcccacgttgcaggccgggcatggcaccaagcaccttctcagcattagtctacgtgttactcacacccagcctatgtgttggtgctagcgcatccccagggaacagagggagaaacggaagcttagagaaattatgtggcttgcctgaggttatagcacttgaaagccacggagctaaaattcaaacctttctgccaccaggcctgggtgaggaatcctatgctacgcggcctgttgcttccatgaaatcccttcctccttccaacaggccttcttttgacttcggcccgttagagcatattggaagctcatctgccctaaaacagtagtttaggctgagagaaaaaatacaggaataggagcacaggagaacaaaaagtctaagtaaaccaagcatggggggtgcgcaatgacccagaactgatcaacagcttcacgtttcttttctctctagaacgggggttctcagtgggagaggggtggatttggcgatactgggagacttccctggttgtcacagcctgagggagtgctaccggcgtctagagagtagaggccgcaatgctgacacacatcctttaaggcacaggacatccccacgacaaacatgccagggcccacatatcaatagcactgggctgagaaagtctcctctaggaaacctgtgtctaggaggctctgctcttcatcactgcccccagttccctttccttcccctctctcgccttcccacatccccctgtgcccaccacatggccaggggaatgagcccctgcctcgccggcgggaggacacctgcagagttcccagagctgtcaagctcctccgccacgtgcgtggcagctggtgcctgggcgggccctgcacttgggctccagctcgccttcatggcttcagatctcctcggctcatgaagcagctcatgaaactctgggttctcacgcaggtaaacaggaccagcatttccacatgaagaggaggactgtgtgctcatttttcattttctcaatcatttattccaacagctgctgtgatcctcccacataaaaaaagaccaaaatgaaacaaatcctgcttttgaagagctgctaacatcatgggagacggaacaggtgcacacatcactcctcttcaaagccacacgtggtggataccctaaaagaggcttcaacatggcaagtgctggacagtgctggaggaaagagctggaagtagctggagggtctgagaatggcactggagctgggccttaaggatgaacagaattttaagaagcagagaagagagcaggggtaggggtgtgtgggtggagggagggtgcggggcccggggggacttcatggacagaagaaagagcaggagtgagaatgggcggcccaaggcgagttccggaaggaatgcctgcatcccagcgaggccgccttgggtctggggagggtggtcatgatttgtgtgctgacggtgacatctggttagggaccagttggggtcctagtgaaggccacacaaaaagtgaaatccaaacaacaggggcctatttcaatcaaagtagctgcactgtgtcagctaacttgactatgttaaaaaagaaacccaattcaaaatcaaatgtcccatcacacaggtgaggctgggtagctgactgcagaagagggaaagaacattggtacaagcttcttaaggagaacgggaacacaaattcccccgaccccgttcaccgctgaaggcaagcttcccacttccatcctggcctccagcgcctggcgcacgcagcctctgagcacagcaggccctcaaagaatgctcgctaagggaactagtggggctccaaggtcaaagtcagagccatgaaaaagctaaacagaccaaacagactcatttaatgttctcggcttagtgtttgttttagttattttcctaagactaacttgttgctagagttaatttctcccatgacaggactttctttcttcctttttttgatacgagtctcactctgtcgtccaggctggagtgcaatggcacaatctcggctcaccgcaacctctgcctcccgagttcaagcgattcttgtgcctcagcctcccgagtagctgagattacaggcacccatcaccatgtctggctactttttgtgtttttagtagagatggggtttcaccatgttggccaggctggtctcaaactcctgccctcctcaacctcccaaagtgctgggattacaggcatgagccaccgcgcctggccaggactttctattttgattgcttcctgctagacagaatgcacagctcaggtgctcaaggccgggcacctgaagccctgtaatggtgtgatgcccccaaaccatcagatatgcaaggatgctgggtgcctggtagtaagcgtccgtttcagcgatgtgatgtaatacaggaaacagagacgtcagcattaactacatctgtggaataccaaaaattcatacacagcaaatacatcacagagggatttaaggggcagtgagaaggaccttttcttcaatgaaatgatgacaggacctccaagtctcctttgagagtcacgctcttaacatcttgcttcaggaatcaatccaatcatttctctttagcctgacataggagctgctgggggagggaggcaggaatctcctatttatacccatatgaaattcttccaggaacatttgggagggggctatgggaagtgaagcccaagtagggaagaaaatgcttcggtcactgagctaattgttccctgttgcttgtctttttaataactgacaacaaaacatccaacagtaataaggaagcaggcacacgggtcctaatagctgggggaagatggccccaagtggatctgcacattgtatgtggtcaacagtggataaaggatagttctgttagagcacagagtctggtaaacagaagtaggaaatgagaaaggtttttaggtccccaaataacccttttcaacagaaaatgcagatgaacaacttcaatccagtccaacaatcaaatctcatccagtgcttcaaacaaaaaacaaacatgcagctgggcgtggtggctcacgcctgtaatcccaacactttgggaggctgaggcgggcggatcacaaggtcaagagattgagaccatcctggccaacatggtgaaactccatctctactaacaacacaaaaactagctgtgtgtgatggtgcacacctgtagtcccagctactcaggaggctgaggcaggggaattgcttgaaccctggaggcggagattgcagtgagccgagatggcgccactgcactccagcttggtgacaaagtgagactctgtctcaaaaaaataaatacataagtaaacatgaccaggtgcagtggctcatgcctataatcccagaactttgggaagctgaagcaggcagactgcttgagctcaggacttcaagaccagcctgggccacatggtgaaaccccatctctactaaaaatacaacaaaagagccaggggtggtggtgtgtacctatggtcccagctactcgggaggctgaggtgtgaggattgcttaagactggaaggtggaggttgcagtgagccgagatagtgccactgcactccagcgtgggtgacagagtgagaccctgtctcaattaaaataaataaataaacaacaacaaaaaccaaaaactaaagcgttgccctcatcaggctgtttgagaaatctgaaaaactgggtagaaagggagttctggggaatgaatgcattcaggcaagcctgaagcagcattagcacctggtggtgctctgaaaactccgagagcactttgctgccagctgtgcaaagggtaggctgaggttctacagccaccaattatgcaagcacatgctataaacaagaataagccagattctgcatgcatcccagggacatagaaggagactgaactgtacctacctgatactcgggaatggacctcactgcttccacgacagccacggacatcagatgctggacaaacgggatcctctgtcccagctgggatctcagtggaatggagatgagcagagtagaaagagcacatcccacagggctcagccacacattccctccccgtcctggaacacaggccacagtgggaaacatgctaccttgccacgtggacagacgcagacacacgtcatgccagggccacacactcaaataaatctgaacttattacaatgcttattgtattacaacgcttattatattctgggcttaataaaagaaaagctttttaaaatctgaagctctgttgctgaaaaagtttccaataattagcataatgttctgcttctgtgagcatatcatttgtgccttgatgactcagagtcttacagcgtctgaacatgactatatgactataggtttaattcccagcatatggtcatgaaggcaaacacagacattgggaaactgaactgaatctatactgatccatgagaggtcctggaagccactgtttagaagcaattcctattgtggcgatggttgctcagcccagcaaatatgccattaaataagagccacagaactgtgtactttatttatttttattattattttttaagatggagtctcactatgccacccaggttggagtgcagtgcgtgtgatctcagctcactgcaacctctgcctcctgggttcaagtgattctcctgcctcagcctcccaagtaactgggattaaggtgcccgccaccattcccaggtaagttttgtatttttagtagagacagggtttcaccatgttggtcaggctggtcttgaactcctgacttcaagttatctgcccgcctcggcctcccaaagtgttgggattacaggcatgagccaccacgcccagccacactttaaatggaggaattatatttcaataaagctgtttaaaaagggattcctgatattaactgagttgttatttttctttacttcctttctttcttcctttttatttttgagacagggtcttgctctgttgcctaggctggaatgcagtggcgtgattacagctcactgggctcaagtgatgctcccacctcaggctcccaagtagttgggactacaggtgagtaccaccatgcccggctgatttttgtattttttttaagagatgggtcttgctaagttgtcccagctggtcttgaactcctgggctcaagtgatcttctgccttggcctctcaaagtggtgggattataggcatgagccactatgcctggcctacttttcttaaaattgaagttagaaaaatagaagaatccaaatgagaggtagagttcatcaaagttcttcttgaatgtctttttcaaaaaacaaaaaaaaaatccacatattgagatccatagcttttgacaaaaacattttttttttccatttgaattatatttgaaagacatggttcaggagaaagaagtggagaacagcagatttcttatttctttggttcttatgaaaaagtcataagaggctgtgagagtgagaagcacatgtgggtgagcctggcactggctggagcagggaggggccaagccccgtggagcagcccctgtacagggtcagaccccagatgggtctgggaggatgtgggctctcgtctccgggatctgcaggtggtggagccctgggcagcgctctgcttctctgtggtcactgtgtgaatgggcactgatgcagagcccaccatgtacatgcaagcccagcccagggccagctggggtgagaactggcatgcaaaaggcctcccacatgacgctcagtacagacacagaaggctccttatggagaaccttcaggaaaataaacgtctctagagcacagtgacgatccccaaattggaaagcccggaattcatgtaggtcacatttgccatcacaggcaaatgtccagtgattcataagcattatgatttgacagaatgctttagttctactaagggtgaaccttctgatcactgcttccctcttcctcttcctccattccaggcggttatgaaaacagaatctactaacttgagtcccccagatgatcagcacacacattcaatgggctcctgggccacaagagttgcagagtttagaaaacagaagtaacagcaatgatcacaaaagatgactgacctttgccctcggtctgccgggccgcgatcactattaagcccatttcctgcggtgtctgaaacatcagcctgccgaagagggggaaagaccggttaggccagacatggacacgcccgcggcaccaatggctcacacaggagggacagggtttgcatgcatctgggggtgtgtggccatggaagggccaactttggttccactggccttcaggaatgtggagccatgagggatatcaccctcctttctaacctgggtcgtgagaatgaaagagatgaagaaagcaccttttaacatcaaaaaaagagcatgcgagggggcgtgtgtacctgcctgagccgttactccatttattaaagacttggttagattctatttcatcagaatatcctgccaagttctttctccccccacccccaatgtatgtaccttcttcaagtgacaactagcaattcctgacatttgttcctacttagggtgcacttctgtttgaacactagaacacaatcataacagaagtttctgattattcagaaaaccaatatggtggcaataaagccgtttaaaagacacactatcccctgagaactaattatgatttaactatggtaaataaatccacaccttctgaggacgcaggagaactctgcatcgttttcggcttcagtcctgcttttaaaatggtttcattgaaaagaatacaaactttcctttgggggataggtagaaaagggcattacatccccaccaaatgagtcgatattaactttttttcaaaaaaaggaaagaaaaaaaaatcacacaaaaactcccactctgagaatttcctgcaagctgcgctctccctattttaaccccgtggtaggacagttcctctctacgtgcccaggaattgccgatcaggtgctgcgcaggcgcggttcgaggtaggattcatcaacagagcaaagatcaggtttggccactttgtcagtgcagatgagggggcctctttgatttttttcttttcttttctttcttggaaggaggggagcagccaggacagggatgcggaagggatggcattttgtaataacataaagtttctaataataagtctccaggcttccacagtggtcctgctgaggacaaaggagcgctagagaaagaccacgctgagaagcttatcatcctcccctcccagctacagaaactgggtggaactttacaaatggctggaactcggtaagagaagaaaaatacttaaaagcagagagaaacaacactgtgtccactgtgcacccatggctcacagagctccgtctgacggcgcatgcaggcctcagttgggacagaaggagcccagaagacccttcacgtgttaaaaagacctcaggacacacagggcaggggctcagctgctgagatagctgtcttcccacacggctgctggaacaggcacaggacgctttcggcgagcaggctggcctcgccgcccatgtgccaggcccactccatctcacatgaaatacagctcagaagtatttctcttggacgccatgaataactcattgagatcgagtgtgctgtatgccactgggtccaagaagaaagcgtccttttcttgtgttggaccagcagaaaatctaagaaggagtctttgtctgtgcagggagttaacattgtctttcaggcacctctgttttctagagggtccagcaaccctccacctggcttcctaaggcccagggctctcgaggtgatggggcaggggccgaggggatgatttagcgtgttgtgagcagatcgcaaaagcaatctaggatgttctgtaaataaacatgtagacggtagacagtcatgggctatagccagggacagtgatgggaggggcaggaaaaaggttggttcagaaaccaaacacagacttctagaacaaagagaaatgattaagggaacatatgcactaaactgctagaggtttggcagcagttaacagggcatattaatgagaagagggagtctgtgctgaaggccaagaggaaattctgcaaggagggagacaaccggggaaggagctaatgctcagtttgagacaactggaggccgccagatttatttgtgctatctgagataactctggggccaaaccgcatggctcacagtcaacaaagcagcatttataaaccttgtcaattctgcatttctgaaaatgaagctgcttgagtttgctttagcagaaaggagaaaccataaatgcatttccatccttagcggatgatgtccttacaaaaagaaaaaggaaaaacaaaaaggaggggggttccataatgattacctccctgcttctgtatattttccttccttgctggcaaaggttgtggaataaaagctttctgtgagtggcagccgagtgcattcactgtggaaccaaagcggcactcaggaaaagcgctctgttttgtactcttgtgttgagtctgaaacatttggagcctcctaagggtcactctgcaaatgagacagcctcctgaccactttggttactaaggacagcccagtagccacggaggctctgccaatggaactgtcctgattgtcacatggtcctttaagattaagctttaatgattgggaataacctaagacaggccagcatgaattaatgaaaaatccgaatgaacaaaaacgtaaattcagaccaagtccatccacttcggggatctgaacctaagaaaatagtccacattcacaacagtgttataaaggtaaaaatatggaaacaacctcactgttaataaacaaatggttaaataaattctgataaattaagtcaatggaataatttgtaatcaaatcattatagttctgaagactatatagcaacgtggaagaaaggcttgcattggtatgtcaaattaaaaagcagcatacaaaactatagatgcttttttttttttttttttttttgagatgcagtctcactctgtcgcccaggctagagtgcagtggcatgaatctcgggtcactgcaacctccatctccaaggtttaagcaattctcctgcctcagcctcccgaatagctgggattacaggtgtgcaccaccatgcccaacaaatttttgtatttttagtagagacgaggtttcatcatgttggccaggctggtcttgaactcctggcctcaagcgatcctcctgcttcagcctcccaaagtgctgggattacaggtgtaagccaccacgcctggccaaaaactacatatacttttattccaagtatgtaaaattcaaaaagggcaggaaggagattagacaaaatgttaatgatggctatattaagattttttttcttttattttaaaactttaatatgatgggtaacctttctttttttttttcgtttgagatggggtcttattctgtcatctcagctagagtgcagtgactcactatagcctggacctccagggctcaagggatcctcccacctcaacttcctgaatagctgggaccactatgggttcataccaccacacctggctaatttttgtattttttggtagagacagggtttggtagagcccaggctgggtaaccttttgatttaaaatttattttgaattttttttggaaaaaagcatatttttacatttagatataatattgtaattgactattcataaatacagaacttctaagtataagaccaaaaggtccgttttaaaaagaaataagacaattggccgggcgtggtggttcccgcctgtaatcccagcactttgcgaggccgaggcaggcggatcacgaggtcaggagatcaagaccatcctggctaacacggtgaaaccccgtctctactaaaaatacaaaaaaattagctgggcatggtggcgggtgcctgtaatcccagctactcgggaggctgaggcaggagaatggcgtgaacccgggaggcagagattgcagtgagccaaggttgcaccactgcactccagcctgggcgacagagcgagactccgtctcaaataaataaataaataaataaataaatataaaataaaataaaaagaaacaagacaatcaacaatagttatttgcagtacccatttcattataactagtgagcagcttatctgatactaacaagtgagcagaaattcttgaaaccagtctgttcagacccagtgatagccttaaacatggtttacttcctgacccggggactgtatttctacagaattgaagcctgaggaggactcagacagggacacaaaataattcaggggctcaactgttcaccacagcattactgatgcagtgtgaaaaatcagaaataatccaaacagcccactgttgaagaattaaaaaacccacagcagtcccacatgaaagcccatcatgtggtcatcagtaatgtgggcagatgaccaccggacacttttaggtgatttaatcaggatgcaaaatcctacagacagcgtgagtccaatcatgttttgaagtatgcttttaaaaattatggccgggcgcggtggctcacgcctataatcccagcactttgggaggccgagacgggcagatcacttgaggtcaggagttcgggaccagctggccaacatggtgaaaccccatctctattaaaaatacaaaaaattagccgggtgtggtggcgggtgcctgtaatcccagctatgtgggagattgaggcaggagaatcacttgaacccagggggcggaggctgcagtcagctgagatcacaccactgcactccagcctaggcaacatagagactccaactcaaaaaaaaaaaacaaaaattattaggaaatataccaaaataatagctgcagttaccttggggagtgaacatatttgaaaaatatagaaaaatattaagtagaacataagtcatctaggtaagtcccacttctcattaaaagtgtatattcttttagaatttctctctttttagaaaacacagatatattttacaaagtatttttctgataattaaaaattttttattttggagctcttacaatgatgtagatatataattatagacattatattgttaaaaagtgaaaaagaaggttaaaaacagtatcgtagaatgattctctttatatacgatatgtatttatagaaaaatacaggggccaggctcagtggctcatgcttgtaatcccagcactttgggaggctgaggtgggtggatcacttgagcccaggagttcaagagcagcttaggccacatggcaaaaccccatgtctatcaaaaaatacaaaaatttagccaggcatggaggtacatgcctgtggttccagctacttgggaggctgagatgggaggatcacttgaggcagggagttcaaggctgcagtgagcaaagatcatgccactgcactccagcctgggcaacagagcaagacactgtctcaaaaaaaaaaaaaaaaaaaaagaaggacacatattaacagtggttatctcaagaaggtggaagaggccgggcgtgttggttcacgcctgtaatcccaacactttgggaggccaaggcgggcagatcacgaggtcaagagatcgagaccatcctggccaacagagtgaaacctgtctcactaaaaatacagaaattagctgggcatggtggcgcgcacctgtagtcccagctactcgagaggctgaggcaggaaaatggcttgaacctgggaggcagaggttgcagtgagccaagattgtcccactgcactccagccaggtgacagaacaagactccatctcaaaaaaaaaaaaaaaaaggtggaagtgtggaagtagaattatatgatgatttaaatgtctcctttatgttgttctatataatctctgggtggtaagatttcaagtgatttttatttctctcttatactttactgaattttccaatatttttataattgtagtgcattcattttataaatcctattaaaaaaagatttatttaagcccaacctatcagtggattaagcttgcagctgccagttcactagttggtggagcaatctcctttccagcacagattggcaaagaaagggcggccaagtgcaggcagctttcccaggctgccatacctgtcccgtggctcattccctgccgcacaggccaaggccacggagggctggcagtctgccactgggagcagctggcctctggaagctgggctgtacctcagactggcctccctttctaaaagatgttgtaaagtctttctctggaaaacacaccccaaaccctcctaagtctgaggcatcgtgccctgcagcagtctggcatggggtgggtgtgaggcgacctcgaagtctccctcgggcctggagggcttcctcagctcatggtcctggcctgacaccagtctgtgcttctctttgctatcttctttaccccccagttttctcagctctgaccctgttcttagcttacagagagacacacactctcatgagtgaaaaagaaagccaatgggaggtggcgaggaagagggagaagggggccccaggcagtcacacattgaaggttcataagttatttttcattttaaaaaagctgactggaagatgaattcccactgttcataaccctgctgccctctgcttagttcaaaggaagcagtgccgaacttcatttcagaactacttttaacacatattacattgtaaaaaccaaccattacatctgagtagcactttctaaaaagttaaaacgctaaaatatcaagatatttcatttttgttaaagtcacactttaacaatacgattgattttttttaagctactttctaggcaggaatgcacaagattgttttttgaaaggaaatgaacagtggtttctgctaaaaaacgcctccaccgtaaaatggagtgaggcccatgagacagctgtgcaacgcatggggacacagtcaggggcagaagaggcccgacttctgacaggtgacttctgaactggcggcagggtccacggcacaaagctgaggtggctgccccaggacactgcagggtcctagccagggaccctggggatattattcctggcagctacaggaaggttcccaaggaactttagaaacatcacagcagagtggagactcagacagggaacgggacagatctggactcgaatcccagtgttgatatgaacatggagtaagggaatccatctctctcagtctctccagtcacctataaaatggaacattttgtgcagtgtcagtaaaaatgaaatatgatggaatttgcaaagtggtccctgtcatgtcgatcctagaacttcttgctgccagaagacaagcagcgcctccccttacctcctcctcttggggataaggagggaagtcagggagacagagggaaggaatggaatggtggggacaaatgtgtgtgttttacgactcctcaaaaattctatacgtgatgcctctcctctctgtacccatccctcatcacttctacctacacacactaaggtgatctctatctgggctaaaaaccttgtaagtgacactagcaatgggggatgcagaatcttcacttccagttctagggtctctgaacctactcagcaaagctacacatagttggttgaactggctcttcggctgactttgtttaggtgactgcttagaaacactgttggtcagaggtgtgcccaggcagataatagaacagttttattgatatattcttccattctattctggatttgacactacggcctgccctttcctcaatgcactctgttggtatgctttaaatcatatcccctttccgctcttggtgtagaacaggatgaatgtttcagtaggaggcaacacgggaatcgggactgttcaaagagcagagccatcacaatcctcccactggagctccccagaagcagagagatgcctgtgggtcaggccctctgttagagacacccgcttcatttccgtagctcctggcatacctgcccttcttacgtttttggctaatcttccccacgtccagcataagagcgtccacattgctgctaaataaatcatttcatggctcccaaggagcccagtggattcagctttcagaatgaggctcctttttggtaagtcaagcatttactaatgttggtctgtattatccaatcaaagtgaatacaagccactgtttcttaccctgacacttcaccataaatactagatgcctgcgcatccactgccttctatcttaaactggtgctattacagaatttacagatgagcaaagaagcttgcatagagagaaatattcatggtgcccacagccacctctgtggctgtacctcagcggtagccctgatggcagatccctgcctctgacggcgagccttcactgcgccactgcacaccagtactcagactatctgtccccactcctccgccaggagtctccggatcctccacaagatcttctcaccccccttttcaggctgttcagatctcataaatatgtccatttttctacaactgggtgtggagcggctcttggtggagagtgtccacagccttgaccataagtcacctgcccctaaagagggtctgctactgggaagtgctgccgctatttcagaggatggacaccgactcacgtggacgacacagcaagcagatgtctgcgaacagtgtttctgcaggcaccaggtagatgtttcaactggtcacctggaattcacaccaattttttgtgctatgagtggcattttaggttcgtgatctcatccaagccttccaaagctgagaagaagtccttcctcacagacaagaggacacagtctcagaaaggcaaaaccactgctataaagccacatagcaagcaaaccagaaattcaaatcatgttctggttggttgtaaggtctataatacttttttctttttaaccttttacttcgaaataatatcagacttaaagaaaagttacaggaagagtacaaagcattcctacatgcccttcacacagcacccagatttcctaaaggttcactttttaccatatatgttttgtccatctgtctatccatcattattttctgaaccagttgagagtgagctgcagccctaatgtctctgtattcctatatgcgtctgtgtagcttcctaaaacccagggtttatcttacctgattatagtacaatcacggaaatcaacagccttgttacaacactattttatgcttttttttttcttttgagatggagtttcactctgtcacccaggttagagtgcagtggcacaatctaagctcactgcaacctccgcctcccaggtttaagcgattctcctgcctcagcctcctgagtagctgggattacaggcgtgcaccaccatgcccggctaatttttgtatttttagtagagatggggtttcaccacgttggttgggctggtctcgaactcctgaccttgtgatccacccatctcagccccccaaagtgctgggattacaggcgtgagccaccgcacccggctgatatggcactattatctaatccagaggtcagcagaattctctataaaaggtcagagagtaaatactgtaggctctgcagccgtatggtttctgtgctcaattgctcaaacctgccgtccgagggcaaaggcagccatgcctgtgtctcaacatttacggacataaaaatttgaattttacataatgtttgtgtatcacaatatattccttttaactaataggcttttttattttttttagagcaactttaggtttacagaaaaattgtgcagaaagagttcccatatgtccccttccccaacagtttccttatcattcacatcttgctgtggtgtggtcatttgttacgatttctgaagcagtcttggtataggactattaaccacagctcactgcttctgttagggttcgtgctttgtgctgtacattctgtgggttttgataaatgcatcgcatcttgtggccaccatgtcagcattacacagaacagtttccctgccctaaaaattcccctgtgcttcacttattcatccctcatcccttcccctccccgaaccctttggcaaccaccggtatttttactctctctatagttttgcctttcccaaagtgtcatataaattttattctttaaaattttttctgaccctttaaaatgtaaaaaaacatgcttagctctcatgcggcacgaaaactggcagcaggccagactcggcccaagggccaaactttgccaaccccagatctcatctatagagtgtattcaaattgtgtccattgtcctagtaataatgctctttttttctggtctaagatcaaatccaggatcatctgatgcattgagctgtcacggcttcttcgtctcctttaatctggttcagtttcttagtctttttgtttttcatgatccagacatttttggaagagcaggggcagttattttgtcctatgtccctcaatttagataatcagatacccccgttataagactcaggggtgcatttctagcaggaatacatggaagcgatattgtgacctcagggcctgacatcgggaggcaggcagtgctgtctcctgacatcagggatgttaactttgacccacagggttatgtggtttgtgctgggttttcccactaaattgcctttgtaattaataagcacttatggggagataaatctatttctcatgaaatttaatctattagttttagtatccatgaatgattcttgcttgaatcaattattatttttatttattttttatttttttggagacacagtctcgctctgtcgcccaggctggagtgcagtggcacgatctcagctcactgcaagctccacctcccgggttcacaccattctcctgcctcagcctcccaagtagctgggactacaggcgcccgccaccacgcccggctaatttttttgtatttttagtagagatggggtttcaccatgttagccaggatggtcttgatctcctgcccttgtgatccgcccacctctgcctcccaaagtgctgggattacaggcgtgagccactgtgcctggctgcttgaatcaattattattattattttttgagacagagtctcactctatcacccaggctggaatgcagtggtgcagcctccactcactgcaacccctgcctcctgggttcaggcgattctcctgccacagcctcccgagtagctgggattacaggtgtgcaccaccatacccagctaatttttgtattttagtacagacagggtttctccatgttgaccaggctggtctctaactcccgacctcaggcgattcacccgcctcggcctcccaaagtgctgagattacaggtgtgagccaccgtgcctggccttgaatcaattatttacttgatggttgccaaacagatttttctgaaccatcatttcttccatattcacttgtgaggttctactgtaaggagtaactttttcttctcccctccacttattatttatcttttaatttatttatatcagagtagacttatagattcttattatttcagtagattgtatgccttcctatcattttttattttgatactcaaatagccacatatctggcaagtgaatgctccttcagtctggctcctgggtcttactggtgtgtcccagtcatctttcagcataagaggtctctactttcaggcataagaggttctaggctcatcttgaactttctcagcccctgccctggaatcagcgatttctccaaggagctctggttccttttggtgaaaaacggtcttttaaaaaaactggggctaagaaagagatagaaaatgtgtgcatgtgtgtctagggtgtatatatgcattacaattgtcccttggtattcatggaggatttgttccagactgcctcccaagtcccacagtgagctctgtggaacctgagtacacaaaaaattggcctccatatacatgggtttcacatcccatgaataatctgctttggttgaaaaaattccatgtgtagtagacccctgcagttcatacccctgatgaatcaaaggtcaactgtatttccttccgtccatccatccctccctccttccttccttccctccttccttctttctttcttccttcctctagattctcatcttctttctctatctaatctatccatctaccacccatccatccatccagtttgaaaaccataagttcatcataaactccaatccaatccaataccacaaggttcattctagcccctccttttctatattcataaattctttctccaatagtgggaaatctggcttgcattatctacactatttattcatttgctcaatgccataatacacagggggaagtggtctcagcagtgctgatccatattactgcgaaatcacacttactaactagagttcaatatttgtttacagttttttttgcccttagcctgagggtatagattcaaatattgtattgaacatttccttggatttgttcttttttttttcccctttactttagtgtggttattttatttgtctgaaatcaggttaggtttaactgtacttctatattacattttacccccacacccaaaccccaccaatccttctttctttttcattgtttaacctggttcagagtcggaactgtacacagacaagtatactccgagaagtgtcacactcccctacccattccttctacctaggtctcccactccacctcctttctgtaaaccacaaatcaaaatctcattcatttctggtttattcttcctgtgttcctttttgcacaaatgaatggatacatgcatattttcttatttccttgtcttccttacagaaagttaccattttgtagatgctcttttgtctcccccatccacctaccccacacaattaatatacccgggaaccactaggttgcatactccttatgagaatctaaggcctgatgatctgaggtggagctgaggcggtgttgctagtgctggggagcagctgcaaataagttcatagagcttttcctcattttttctttttttcagacggagtctcactctgttgcccaggctggagtgcagtggcgcgatcccaggttcacaccattctcctgcctcagcctcccaagtagctggaactacaggtgcccaccaccacgcctggctttttttttgtatttttagtagagatggggtttcaccatgttagccaggatggtctcgatctcctgacctcgtgatccgcctgcctcagcctcccaaagtgctgggattacaggcataagccaccgcacccggctcctcatttcttcttaaagctgagcagactccattctgtggatgtagcacagcctcttcaaccactcttttatgtataggcatttaggtagttcctaaaaggacagtataatgaacactcttattcgcatggatttttatattgctggaggtatatcttcagggtaaattgctggaagtgggatgctgagccagaaggtaaacacactggtagctttatcagattctgccagaacccccactactgcacacagccgcgcagagatacctgtttccctacagcctaaccaatggacagtggcgtgtgtctgtgcatgtgcgtgtgtatacacagtcaatgaccagttaatgtcttttgagttaactcaaaagttaagagtttcttatatattagggcagagtccccagctctgccccacccccccaccccccaggctgcacagcaggaggtgagaagcaggcaggcaggtgagtaagaaagctagaaaagcttcctctgtatttacagccgctccccacagctcacgttaccacctgagctccacttcctgtcagatcagcggcagcattagattctcataggagccctactgtgaactgcgcatgcaagggatctaggttgcatactccttatgagaatctaaggcctgatgatctgaggtggagctgaggcggaggttgcagtgagctgagatcatgccattgcactccagcctagacaacaggagcgtgaaactctgtctcaaaaaaaaaaaaaaaaaagccttgatggtatttttagtctaagtgcattaaatgtataaattaacttggggagaactgaccatctttgtgattttgagttgtcctacctatgagcaaaggatgacttacatttgttcaaatatacttttgtgtctttcagattgttttaaagtgatcttgtgttgattgtgcatatttcttatgcactatcttacgtattttatcttatttgttgctattatgaatatatcccataatttcctttaactagttattgcttgttgtatataaaaactattgatttctgtataataattttatatcctgctctattactgaattctcttattgtttgagttagagaatcactgattctttaaggtttctcatttcctctgcaaacagatagttttacttctttttcaatgatacctttaattgacttctcttgtctgtttggattggctaatacctttagtacaatgccaaacagaggtggagacagtgggcctccttgccatgtttcttagtgtttccctgctatataagatgctatctaggactcacagacacttacaagtcagtaaattatccactaagtcctatttttggaatttttaaaaatcaggacagggtgttgaattttataaagtgttttctcagtatctatggaaataatcatacatttttcttttttgatctattaacatattaatgagttaagagatctattaatttttttaatattaaaccaatcttgcattcctagaaaaaaaaatcacatttgtcttaatgttagattctgttagttaatatttatttagaatttctgcattgatgctcattagtgatactggcctgtaatttttatactgtctttaacagatttaagtatcaatattatttacttcattgaaatgaatttgaaaattttccttcatttttgatgagcccatcctttttccactgaagtactccttctgaggaagactaaaaaaaaatttctgccaatgatcctgtaggaaaattccaaaagaaacctttttgatttcttcttgaaatagctttcagaactcctgttctcaatcaaatatctttgcacctacaggtctatgtgaggtacttgcagcacatgggtagtaagacaatgagtttatattaatgtggactacatttaagaatctacatataagaaccttaactgaggctttaccttaatactccagacaaacaggctggagacctgacctccttaagaggtctggaccagttctggtagagatcagcccagaatgaccaggcctctgaacattccacaaaacgtgttccatggagagggtgtagaggagaatagggagcattaccgaacagcaaaggaaaacactttaagactctcctcaaccatttccattaaaatttcagaaacaggccaggtgcagtggctcatgcctgtaatcccagcacttttggaggccgaggcaggtggatcacctgaggtcaggagtttgagaccaacgtggccaacatagtgaaaccccatctctactaaaaatactactaaaatactactaaaaattagctgagcatagtggcaggcacctgtagtcctagatactcacgaggctgaggcacaagaatcacttgaacttgggaggcagagactgccgagatcacaccactgcactccagcctgggcgacagagtgagactctgtctccgaaaaaaaccaaaaccaaaacaaagaaaacctccagaaacagatgagaacatatttagatgttttgtattgtattaatactttttgctcaattttaacaaatgcctcagtctttgctaggagctacccacctcaacaagcatgggttcctggccataccatcaaggtcacagaggcaaagctgcctccagagctaggctctcaaacaatgctgcccatcagaatcgcctgcagttttaaaacacaaagcaaaaacaaactgatgctaagaccccagataccctctgaatcccaacctccagagccagagcttgggtgtgtcccagatgattagaatgcagctggtccaaagactggggttctaaaaccactgttcccaaagctatttttcaatgacttttttaaaactacatttcttttaaaaaatttccagagctacaacatcaaagaggcagtaattctcttctggttccttcaatgattgaaatgaagcatcgcattattttgatatttactaggacggcacaacaacagtcccacagatggagagatttcattttctagagccagagggtggtaggtagtcgaggaaaaggaaaaaggggaaaggaacaaagaactggcattcggacacaaagtgtgcaccacaaagtgccattacgtgcaagacagccacttagtgtgtctgaatccctgttggtgttctgtctccctacagtggcttcattcgcgatcaccagatgtcaggtctgccagatgtcgtttttagcaccatgaagcatagcaagggctggtgtctcgcacacacacaagcatgtgtgcacatgcacacacacacatgcacatacacacacacacatacatgcacaaatccacacacacacacacttgattgccacctcaatatggcaggcttccaacagtgagcacaccagccaacatggcaccatctttccactcactgtaagatttctccaaggtcttataaatgaatgaatgaacgggccatggggaaggggtatcttcagctatagatctcaagattctacactgcaagcaagccagtggttcctttgactgagcacccatccacatgctgggcccttggtatgagccatgttctcatttaaatgtcccagtgactctcaagacatcatcattgccaagtagtctcattttactgctgataagtggaagctacaccgcagaagtggcctggtgagatcagagaacagtcaaccaggtttgcctggctcagaggcccatcttctgactcactaggaaagaatcttttgcttttatcaaaacagaatttcaaggtagaaataccacctcttttttttttttttttttttaatgagacagagtcttgctcttcacccagcctggagtgcagcggcactatctcagctcactgaaccctctacctcccaggttcgagcaattctcgtgcctcagccacctaagtagctgggactacaggcatgtgccaccatgcttggctaatttttgtatttttagtagagatcgggttttgccatgttggccaggctggtcttgaactcctgacctcaggtgatccacccacctcagcttccgaaagtgctaggattacaggcgtgagccaccatgcccggccggccagcctcttaaaatgcatttgtgtaagtttaacagtcctggaggctataaggctttctagaaagatctggaaattgacttccaaataataacatcaaaatggggttcttgctttatctttttttctgagaactgaaacagagtcaccttacattttctaaaagtaaatactaccagcttggtggccaagttcatcagttctgtgctatgtgtctgaacagttattttcccagctctgtacgtattctgcttcaaatacttcattttcccttatgaaatttacataaattataatactaataagaagtttctttacctacagagtgaaggggcatctgaaacacctgggcaaacaaaggaacctgaaggtaacgaattccttcctacagaagggcagctccacccggccacttgggcccttgattttaccccaggtaccgtcgccttcggggtaatgacaaggaagaatgccctgccctgccagctggcctgaaaaccagtgtgcctttcaccaccctgacgccctgtgtgtcaccttcctctttccctctctcggctcccacctctcttcagagccttccctgcaccccgccctgccagagatcaaccaacacgccagagctcgtttgccgggatgcttagcaccagcttaactcttcactcagtgggacaaggggcctctttctttcaggcagggctttgctccatgacacgctgggtttatggcccccgtgaacgaaacctggttcggaatccaattctacaacagattttcgttcaaatggttattttccatcccttgcccccaattccattttctacccatctctcccggctctctgcctgtgggggctgaccccttgagacctgggtggattcgtgcttctgggtgggttctgtgctggcaagacattttatatcctgttctcttactgaatccttgtactgtttgtttagtttgatcgtttattctcaaggtttcccagatatactacaatatcatccacagatagagttttacttcttttctgattcttaggtctccagttggcttccgtgtccacttggattgggtaatacctccaggatgatgctaagtattatagaagtggaggcagtgggtgtatcctggccttgttcctcctgatctctgtggaaatgctcttaggtttccccaagaagcaggatgctagctttaggactctggatctcacccactccctcccacctatgagtctttggaaaatactatttcctcccttgctatttcaggcccaggtggcagaactcctctctctggggacccctccattgtgtgttttcccttccacaggattctgagttggatcctgtgtctgtctgtggccctgagagctgcaggtatcgactacaggctcagcatggtgggatgggctgtatcctcaaccctgtttcaacagggacacttctgctaggagaggagaatgggcccagatgtaaagctgcccttctccagggtttcctgaaccttctggtctctttgccttcatcttgcctcttcctgctccgttaaaaagaaaatgcttcccatttgttaattgttgagagtgtatgctgctgttttattttgcttgacatcttacaatcaatcttctgtatatgtttatatatgcttttctatttaagctttttttttttttaaatctaaaaaacacagtaccataccgccaaaggtgtcaggaaacacgctcaaataaggaagggctccaaagactgctttgccaacaaaatgccagtaaaatctgaaacccaggttcagacacactgggaacgttccaaaatttaaaacttaaagaacttctttattccagtaaatcagcttccctgtgaataccatcaaaatcctgggctttaatgagtaagggaatatcagaggaaggggtggagaaggaaaggatttggacgagcacaaaatttaatttaaaaactattatgagaagtttaatttcccctcccccaaccaaacacataaatcttttccatgcattttctttgtttcggtttttcctaaaaaatctggagagggaaaggcatcttgaaccatctgaaatgacagagtcagtggagtctttaataataaatatgtgtttattggattcctatgaattaaatgacatattagctatatgggaggatccaaggaaatcgtaagcaaaattgcattctcaccgaatgtgtaatcaaccagggagaaaagacattgatgggaaggataacgagtgatatgaggccttgggcctcttaaggagtagggacaacagaggtgtcagagtccaggcggggatggctcacttcggcaggggtggtcggggcccagcacacccccaagtgcactgaaagatgcgaccatgtagggagaatgaagctggccttcacagttcataattccatccacaggcagcactgagtgcagccacatttcaacattggaactttccagggcgaagaagcactgaacacgtcgcaagagcatggacttcctaggttttcaccaggccacgcgtgagcatggggctgtgggtgtcggtgtgcctcagcactgccacgtccactctgagtgcaggtccggctcagttttggatgttcctccgagagcagtcctccagggccaccgtgggacgaggcacctctttggtaggccatttgcactccagcacggcctctgttcctaaccacaatgggctgctggttcaaggactccctgccacagccaggaggcacagaagaccccatggaggcacttggctggttaagacccgcaggggtcacctgcctaggcttagcctcaatctccttgtagataaaactggaccctaacccttcactgcccagggcccctagggaataaatgtgccatgctgcgtgggatgcccaaggagagttctgtggcatttatttagccacactggttcctctcccctggtttcttttcatcatcaaatggacatgatggaaagctcctttgcggtctttctaggagaggaggcggcacctatattccagatgcagccatttcacaaccaggcgctgcttcctggtcagagccgctcgaccatgaggatattctacagaaagagaactcagctctctccttcctacctcacatgaccctaaggaaagttaagaaaagaggaaaagacctgtgaagatgcctgatcagctgtcagggttacgtagacactggctgctgttatttactgttccctggctgataaaatagccaggtcacctgtgccgatgaccagacccaccccctacccaccagcagggctgccagggctttctggggagacgctgcagcttggttcttatttcctttgctctgcatccctctgggttgacttgagtctgatcatgggtttattccatttccattttgctagattccctccactccctcaagcttctacaaaactgtggggccaccactccccacaaaagattaaaaccaagatgtttcctagaggtggcattttgtcttcctgaagctgttctgtgcacaggtcctctccacactcatgccaaatgctcggtgaagcgtcttcctgaatgtccctaaggggcacgtgccactggcagagctgatgggcacacctcactcccacacatgctgtgccgagctcatgactcagctgtgcagggcccgcccaagagtgaggcaaacaccaacaccgcacagcgaccctttgtcaatggtggggacctcagtggcttctccatcggaacttagggctgacgggcctccagacctactgttacacactggcccacggaatgaccctcataaacccaagaacagtaaacagagcttaacattctaacgaaatcaagattgctgtgtgtgctttcacaaaatgaaactgcctggaacttctcataacgttttttatgataagcattaaaatgcaaagaggaagattaaagttcctgctacagaccagagcagtaatgagtgtgggaggaggagctctgggtagggtctgggagagaggtttatgtactgcattacagttggatattattatataaaatgagtgtgttattaaaaggatcctgaagttataaaaactcaaaggaacttttactgaggatgaataacttctttggtaaagatgaatgactctcacgtcctagacactgaggtgcagtcacgtgccagagctctttaattgctagtagttggatttcgttgtttttgtggggcacttttttgcgggggaaggggcagaaagattaggaatacattctttgattaggaaagttctagtgggtaagagaaagtccctctagttagtaactgagaatcttgattatcctactagaaaaaggcaataagaagacgcatctcctatggccataacagccacctgattttttttgctctacttcttttaattttgtttgtttgtttgttttcagacagactctcattctgttgcccaggctaaagtgcagtggtgcaatcatagctcactgcaggcttgacctcccgggctcaagccatcctcccacctcagcctcccaagtaactgggaccacaggtgtgtgccaccatgcctggctaatttttaaattttttctagagacagggtcttgctatgttgcccaggctggttgttcgacttcttaaacagtacataccacctcatccatttaatgttacaaacacaatgaaatcagtaagtcagaaaactgtagagtgatgtggtgaaaaacattctttttaaatgtagttctacttattttaaatacatttaattaactaaaattataccagaatatggctttgggcttgatctactcaagtaatttatacattttccctataattttgtttgtgtccataaactaggaaatttccatgtaatctgtatcaagacaatcacaaattctaaattagtgaagaccaaagtaatgtttccctttaccatggttggaagtgtacaggatatttggtttattaattttaaaaattatgagagtaatcccgacagtctggaaaacagaaacaaaagatttcatcacacatactaacacaacgattgccaccttacgcattttctagtcctttctcaaagatgcatgttttaagattttaatctacgaattaataatttattgaaacctgctttttactttaagtggtctgagcatttctgtatcttgccatagtctttctgctgatggacaatattccattgagtgagtgtgtacagagtacttaactatacatctttgtgagtatgaactttccgatgtatctgatcatttcttaagggtagattactagaagtggtatcaatgggtcaaggatattaactttttacaactcctgatgcctactgccacactgcttttcaagaggttgctctaatgtacactcccactggggtttgaacaaggcttaaaagtacctgtttcattatatccttgcccaccctgggtattatcattaaaaaccgttttgggcctggcgcagtggctcatgcctataatcccagcactttgggaggccaaggtgggcccatcacgaggtcaggagatcaagaccatcctagccaacatggtgaaaccctgtctctactaaaaatacaaaaattagctgggtgtggtggggtgcacctgtaatcccagctactcaggaggctgaggcaggagaattgcttgaacccaggaggtgaaggttacagtgagctgagatcgtgcgactgcactccagcctggcgatggagtgggaccccatctcaaaacaaacaaacaaacaaacaaaaaaacattttggtgtgtgtgtttgttggctgatgtagagggtgaaaacagccaacaaacacaccaaaatcatggaggattaggaagtgggacctatggtgtttccttggctcttcattcagattgaagacaggaaacaaccacatagacatattctgtatctggctgcctttcccatgatcttacgcttccgtggctcaatggctgcctttcccacgatcttatgcttttgatcatccatggagaaaaacgcaaacggacgcaggaatgctccaatctgggctgtgaaggctcagacaggcaggaggctgtctgcccaggaaggcaggtcagaagctgctattaaccactctggcagggcagtgtttctgtcagcctgcagagcacttcaggttctgggagcagctgatggcagaactgtggtgttctctccgtggaaaaaaaatgaggaagtcagcaaaatgttcttaagccattccgtccaccattttgtccatctgtgttgatttggcagtggtgttggcaaagaacctgggtgtaggacaatgtgctttgtaaacagaagaaaatgaaatgatagatgcaggggtgcctttgtttgagcttgcttgtatttaaagttggctaaatatgcctcagcagagatctttggggacatgaatcataatagaaaaaaacagcaacatataggcttgtccaaaataaaacctgctcaccgtgcctcaggtaaccctaagaagcgtcctctgttgtaaaaacaattcaaatacataccaagtagcaagaatcgcataaggaaaccccacataggatgtccggggcaacaacatgcagacccccacccctgccggagccgagtacacaccaacccacacatccagggctctgggcagcggtgactgttcagtgagaccgctttcagcatttgcgagaagctgctcaccaactgccaagttcctgctgggtcggccaagaggtatgaaccaaaaatgaaaaaacatgaaaggtttgttttttaaaggcaatacatcaaacataaaaagagcccttttgtatgaattttcagtgtgggagccagagaggagaaaaaatcattttccctcctgggaggaagcagtttgacctcacctgcgacttttctcttacggtgtggatttttctcaccccattaaatgtaacctactctaggtgggttagtaccatgtgagagaaatagggggtgatggggaatatggcagacaggcaggctggggctcagacagaatgccgagcaccctcgagggtgggccctcgagggccacggaagcgggtgccacggggctgcatggaatgcggctgctccaaggggcctgtttgctggacacacaaggattaagtttccatggctccaaaacccttgcagcctcccaccccacccccggcaaaagcactctttgcaaaaggaaaggaaaaaagaacaaccaagttagaatggggttatcttcttaccactttcacaaagaaagggctggctgggatggacacagcaggtttcccactgtgaagccatcagaaaggcagcggaaaaaaacctcatggcagttaggtgtgggccagccacacagacaggaacaagcgagctttcaaacctagaaggtgagtgcgctacctgtcagcgttcacaggactttgctctgaagaacagtaaaagaccatctcagcaccgggtccctaaatccccttcccattaaccaggtgccaatagtgaaacctagaaggggaccctggtaaatcacccggcggctaccccgcaggctcccagcgctacgctctggggaccgtcagccttttcttctgtcacacagcaggagaatgagctcactttggcatctgtgtgaccagggacggctgccatctgtgtgtcactgttatcagtggtcagagcagaagtagcaggtggaaccatgtgaaatccctaacattcaaccgtttagacctgcaaaaatggctctttccttcgatttaccctgatgatgacaagaaaaggagaagggggggagggaagggagagggggagggaagggatggaagggaagggagcggggggaggaggaggacgaccatgatcatcagccaattgtgctacgtcagtccagagtgagctgctacttatgatttcatttcctccttagactgatgggagcaatgacaatccccatttgtagatgaggcacctgctcagagaactgaagttactcatccagggtcacatggctgtcaagaggcatgcccagtacctatgacaaacattcatccccaagtaacgaagccaacaacctgtgtctcactccagaaccacagagctgttacaacacgtggtgcctcctgagccagcagccaggggcaagaacgagaggatgcagggagaggctctggggaaagggctgtgtcccctcagtcatgtgacccccaggctttctagagtgactcatggtgaggacagcaaagatctcaaaatgctgtctagaccttaactctgcccatcaccccatccatttggttttgtttccctttcatttgcatgtgtagtcacatgctcagcatccttgggggcagctgcatctgtggtcctccagaaccccaagctttgcagttggacttgaacccctcatgcgcttttgattcctgattaaataacctgattcgagttgttgagatctttagtttacatcaaataattcttctttctattgctccattcacttctgcacattgccttaggtaccgattcattttctctacgacccccgctgcttacatgagttctaagatcatccacaggtgtgtgcctgtcggagggctcggagaacacgggacagcaggaagcagtcttttttttttttttttttgagatagagtctcgctctgttgcccaggctggagtgcagtggcgcaatcttggctcacttctacctctgcctcctgggccccagttcaagcaattctccttcctcagcctcccaagtagctgggattacaggcatgcaccaccatgcccaaataatttttgtatttttagtagagacagagtttctccatgttggccaggctggtcttgaactccggaccttgtgatccacccgcctcggcctcccaaagtgctggggttacaggtgtgagccaccgcgcccagccaggatgcaatcttattggtgtgtcacttttagcccaagaagcaaaaaagtggagtgagtaagctggtaggatcaactgttatttttatattaaaacaaacatgtaccagaattatggagtaaaaattatgcaaaatttacaagcatgttagagataaatcagaccttaaagaaatttagtgctagtcagaagctacataaatggtcaggcatgtggctgctggtgcaatattgtccctttacggccaagagacctcagacaagttacttaacctctcccatcgaaagcatctctcatgaagatgctgcttcagtcatagggttgtcaggaggatataccaagttagtgcctatgtggacagctgtttagaagcctcagagcaccctgtgaatgtgctttcagacctgccctggattcttagcttctactaaggacgagctacgggtgtgactgggttacgcttggctcattctggcctccctgccgcaacttttccaaagaggcgatctctgagctcctgggagcaaacccatgaggatacagatgattcggcaactttgtgccaggccctctccaggctctggggttgtttctgtgaacaaatgctctgtctctgcacccagggagctggcattctagtatgtgtgtgcaaggcggtgggagagagacataaatgcataatgtgtcaatgcagtgaaaacaaaatacagcagataaggggtacaaggaaggacaaaggatggggtgttcaagtggtccctgaaggctgctgcaataaggcatttgttcagaaagaagatagtgagagcataccatgaagacatgtgacagaggactattccaggcagaggcagcggcaaggccaaaggccctcagtgggattggagaggaacaaaaaggtgaccgacgtggctgaagcacactctgtgcgtatggggttggggggaataggaataagggttatgctggttgggggacagatttggaagtgtgcaggtcatagtaagaactctggattttttactgaatgaagtaggaagcaacactgagcctttctaagctaacagggatgagataactaagttacattttaaaggaattcacctggctgccacatggaaaacagcctggtggaaggaagaaagagatgtgttctgcacattttgaaagtggaacaaagaggacctgatgatgaactgagctcctgaaaggaagatggagtcaagggtgagttcacgacttctggcacacacaactcaaggaaaaagcgatgtgccgtttcccaaaagcaggaggcaagggctgagcaggctggagggtggaatctggtgctggacttagatgtagcaagcataagatgcctatgagacagcccacggaatccaagcagaagtctggagtgggagggagaggtctgggctaggatattcatttgggaatcattatcgtggagatggttcttagaaccatgggaccaggagaggtcagccagcgaatgagttgggctggagaggggaagacgtctgattaacctgactttgttctctggcaaaggcaccaggttgagaattcagaaactcatatccctggtttctttttagcaaacacgaagcatggtgaccaagccatgtcatcacactggaaccgcaaaaaagagaagaaaggaaatgcgcttcgtcttctgcgaggacacattgacggtgctcagctagccagcatctaggtcccacagagggcaggagggatccggaaacactgaggtcccctcctgagaggctcatgccctcacatactttcttaatataatcaaaatgggagtaaatgatgacaatatgcaactttccaaatactgagggttctggaccaagctactgaaacagatttcatagttgctatgctccatactctgcctagcatacggtagtcattttataaacatttgacaaatagttatatttctaacagaaaccagaaatttggggccatgactcctttacagctcaagaaatatgcaaaattagtattccctgagagacagatgtctgaaggccccaagcagtccaaccctgtcctgtcatagcctgagacatcctgccttagggagtaagttattactaactgtggacaagctctgtttcccttttggaggaactgagggcagagatcctgccattaattcctcccccagtgcctgggatagtgccctgtgcacagcaaatgcccaatacatctaaataaatgtcaaatgaatgagcgaataaatattcattaaaaattaaccaaacagttaatttaggtcattcagtggaaaaaagaaaaacagtgaaactagaaaagcatctttttaatttaaaaggttaattaaggacaaggttttaaaaaaatattttggtggatttagtaaaccaagcacacctgggactcaaaatagttgcaatctgtaactctaaacacagcccattatgtcccacgaattagaaaatgagggaaagttgcctgactcgcttcatgattctagtataatctcaattcttcaaccagatagtggacaagaaaataaaaaaccccaaacacttaaacacacagatgtgaaaatcatgaataaaatgctagttaactgaattcaatgctacatcttatgtgtattataatcagatattgtttatcctagaaatgcaaggatggtttaacatcagaaaaatgtatcaacataatacataacatatgggtgggcaaaatgaggaaaatcacatgattttctgaatagatgcagaacagacatttggtaatttcagtagccctaggtcagtccaaatgatctattagtctgatcaatttaatgattttattagattctctaattcccaaaagcatatttctttttactatttaagcattttacagcaatctgttttagatgtataagcagggcccacgagagctgtgaggaaccaggactcggataatccagggcgttgggagacttccccaaaccaggaaatgatcccatgcaccatctgagccttccagtcttcccacagactctaccaaacattatcggggccactaacaaagaaggaagaaaaactactttcaatgttagctctccctttgactcttctactgagggatatgtgggggacccatgtttatgaataataacttccagaaataaaaattcaggagagacaagcaatgcagcacctacagaaacaaaaataatcagacctaaatccacaagtttattaaagtgactttttatcatgatctttttttttttttcctgcaatggagtctcactctattgcccaggctagagtacagtggagtgatctcggctcactgcaacctccacctcccaggttcaagcaattctccagcctcagcctcccaagtagctgggactataggtgcacacaaccacacccggctaatttttgtatttttagtagagacggggttttaccatgttggccaggcgtatctcaaactcctgacctcaagtgatccacccgcctcggcctctcaaagtgctgggattacaggggtgagccacagctcccagcctatcacgatctctcttaacactgccctgacataactcatggctgtaccatccaaagacagtattttgtgctatgtctgaaaaccttccaatctggccttaaaacaaatattcagcaacataatagagtgataatgtcagaaaagagtattggctcccatatccacagttgttttaatagcatttaagaccaacattttataaatattattagaaataatatttattttttattaacattaaaattaatataataaaaatataatttttctcctagctttgcttatgtttgtgttttcataaatagtagaggggagaactaatgattaatcaatgggctgtgcatcacttgggaagttccctgtgtaaaaagctctaagttaacatctttgcaaaaccattaggaagaatttcccaataatccatttaaacatatcagattaatgaggaattaaatgcatctgcacttattcttggtgtggatttcaactgtttctcaaagctgaactgagccagagcctgctcagcagaagaaaaattgagaaggctaatggagagagccgttagcgtaggatgcaatggtttgcaacttggtgggcacacacggtctgaagcctcaccctgccctgacgcctgcattcctaattctgtgcattcacatgttgacttaacactggtttattgagcatttactatgtaacactgttctagagaccgagaaatacagcagtagaccaagtaggcttacgttctggcaggaggagtcagacactcaacaaatatgcaaatacagacacaaatattgggttgtggggttagagaagaagtagtgagagctaaggatggtggggagaagccctctctgataagctaacacgtgagcagagacttgaaggaagtgagagactcgggaagctaccttggcaaggaacgatccgggcagggagaagagtaaacacaaaggatggaggtagtagcgtgtgcttgacctgaggcccaacgaggaggcccagaccactggatgaagtgtgtgcacagtgtgtgtatgtgtgtgtgcaggtatttgggggaggaagggaggcaatcacacagggcttccagggaggtgaggactatgaattttcacttagcataatattttcaagattcacccatgctgtcacacaaattaatattttgttcttttatattgcttggattcctagttgtattctagtaatttgtttatccgttcaccaaatgatgactatttatgttgtttccagtttggggttattcaaataaagctgctatgaatatctacatacagtctttgtatggacaaatgttttcatttatcttggaaaggcatccatctatcaactgattgactgactgattgatctgctcactatgtatcatccagtaatgccattcctagggatttacccaagataaattccagactgttttcaaaagtggctgttatcattctgcattcccaccagtaacacatgagagttccagtttctccacattcttgtcaacatttggtattgtcagtcttttttaagttcagccctactaatgcatgtgaagtggtatcttatcatagtgttaatttgcatttctctgaagactggtgacactgagcattttctcatgtgcctttaggaatttataaattttctttgctgaagtgtcttttcaaatttttgccttttaaaaaaattgagttgtcttaatattgagtcgtaaggttctttatatattctggctatatgtcctttgtcagatatatgtcttgcaaatattttctcccagtctgtggcttaccttttccatttttaaactgtgttttataaaaaaaagaagtttttttagatcaaagtccattttaatcattttttcttttatagttcatgctttttgtgtctcatttaagaaatctttccctactccaatgtcacaaatatattctctgagaagcttaacagtttttgcaactaaatttaggtctatgatccgttttgacttaatttttccatatggtgtcatgtaacagttgagatttttttcctatgcaggcagatattcaatggttcaagtaccatttattgaaatggctatcttttctccactgaatgaccttggcacttttatcaaacatcaactggccacacacaggtgagtctacttctggacacttaccctgttccattcatctgtatatctctatccttacaccaacacgcatagtcttgaatactagggcaagttaattttaagatgtctcctggatatgtaaaaattatatctgagttgaactacagtttatttatatatccaggcagcaaataaatgtgagaatctggaggtgagggaagagatcagagataccaccttggaaaccatcaatttagagatgattcttaaggcaggggactaagggacactctgtaggacacagacatagagaagggaaggggctgcggcctgaacaccccacctgcatgctcactcacatactttcgtcggcctgtgttaacgaagtgctgggtctccccagcctctctcatctgtaagcagtgccaacaacgtccaacacagttccatccaatttggatctgccagatttccaaggagccgaaaacttgaccctacaaatcagagtcccgaattcagcccagaggctcagaaagttgctccagttttctaagcctcagttctcaaatttggaaaaatagaaattcagtaactagccaaaatcatagggttgtttgtggacaactaataagaataaaatgtaaacatttagacacgcaagccccgtgaggaaaatccagccgtccctctttctaatcagggtggtgtgagtttcctatgacccatttccaccatttccacatttatgaaccgtgatcaacattagacactgaaaacacaggaaaacaacttctggacaaatcactgtgagctcaaatgaccccgcagactctgtggccagcttgaccccaccactccatcatcaaagaggaccatggtgagagcctgagggatgaggcactacttgttgatgctggcagggatcagcagaaacatatgttttcatgctgaaaacagaagacacagatgtgggcacacttagaatgcactcctggcacacagtgggtactccgtaactacttggtgaacaaagagacacaaagaaacagcagtcatttgaacaatcagctgagaaaacagagactctgtgaccaagctctccatcaggtatggaacagatgcagtcacaggaatgataacagtcacaaggaaagctgagggtggctccctgccggtaccgctcttggcagtttatgggaaattattcatcctatggagcagcactattattaaccccgttgtaccagtgaggaaacagaggcaggaaggtactagaattactcccacttcataggttaaggaaactaaaacccaccaaaatggcagggctgggacttgaacctaggtcatcaggctatggggttccacggactatggctcagctataatactacgcgatattctctcccatcttcagaatgtttgcttcacttcaagtaaaagacagtaactaaaaattctctttccatcatctgttaccttaaaacagcctaactcacaaaacttcacaacgcaagcccaggtattatggaacccaccaagaatagcaagttcagtgttggctgccatttctaagtggacagtgttaattccctccacttagttgaggggcggagagaggtgttgaaggaaagagatgagatgacaagtctgaagtggcttcatcacaaagcatccatggctgtgatatgtagctgtgtcatccatggcaacattcgcctgaatggagattgtattatggacattgttctgggatgcctgaggctgatgacatgggacatgccggaaatttatgtatttcctacataaatatgcagctgaacatatttatgtaggaaaattaaagaccagactggtcaatcactggtaagccgtcaatgccccctcaatgattacccttgtcattcgtgccagccaaaacacacccagttcacaatagagacgcaagtaacttttcaacctgcaactgaccgctagaaattgattttagtagttgcctctatcctgtgatattttagaaatcaggttatcatgcataattagctctccagcccaaatcatctgtgccacattctattataacaatcggagaggttatgacaatcaagaaaaggaaaaaaacacaggcatctgtctcatagttcaattttaacaggaataaaaataatttgaaagaaagaacaaatacatagatcaaggccacatctgccatctcattgcaaggcacatgcccatcctgtctacaaagcttttggcatagcatgtctggtgcacagtaagtacttaatcagtggcagttcatctttttattattattaatgtttctagcatgaatggatctcagagagtctattaactttccttcctagtcaagggatgcacaaaaatttagcaaaacttcagatattaatttgcttcactgtgagtagttatgttctatttataaaaattgcaaacagattgatttcctttcttttttttttttaaattttttaatttcttttatagagacagttatctaactatgttgcccaagctggtctcaaactcctggtctcaagcaatcctcatgccttggcctcccaaagtattgggactacaggtgtgagccactgcattcagcattgatcttattttcatttgcaattttagcagcaatatgatatatataatattctttaataacaatattcataatgtatatgacataaggtatacaagaatacaactattttatacactaacagtagcaaataatattctctttcaaaattgtgattcatcgaggcaggctaacattagctgaaacaagtccaactgcagtggcccaagtccagggctagtcaggcagctctcctccaagcagtgactgagggccacaggcctcttgcaacttgggatgccgccattttcccacaaggcctccaagattgcagcataaggggaaagggacagtgggagaatctcatgggccaggcctggaagaagcgtacttcatgtccatctgtctgttggttgtccaggcaacgccagcccaactgaaaggggactatgcgcccaggagaaaaatgaaatagggttgggaatcactgttttctgtgtcataaacattctctccgtggacaattaacatctgccttgtactttacagatgtttacacggcacttttcactatgtcttatttattcattcagaaaatttagtcaataaaaaaagttgaaaagttgctattgttattgccattttccaggtgaagaaactgcggcttggagaagtcatttagcatccaagcagatgagtggcacagccaaggcttcattccctgacctccgcatccaaatctcaagccctttccacttttctttgcgtcgtactgaacttcaagaagaacagagatcctgtgataaaacagatttatgacagaagtagggttaccttttcactcccaatgggatccagtgttgtgtagttccataaaaaaggcacgatccccacacaattcaacggaacagcctgagagcaggctttcaccagtccatagtcatatatgagccagtacagggagtgtttcaaaactgaaatagaagttaatatcctgataatctcaaaataagacttctaattcttattttagaggtcaaagagatgggtgtagatatgggtgaacatgattaaatcaaaattatggatgtgaagaaaaactctgggcgatcagggtccagttcctaaccctgtccccttaactagacatgaaacccatgtggaatactcattgtcatggtgacaaccgggtggatggagtttgaagacaggtcagaacacactactaggtccacaaagcccaaggcgtcactgagctgggtgtgaagtggctgtctggcacatcttcttccattgacaagccggcctttgtgatgagaaggaggctcatggcacagtctcagctgagtccactcctgcaggcaggcagcagggaggacaaaacgtccccagcttccttctccatggtctctgcctagagagcatcagtatttcgatgttcagcatggaatagacttccataacattgaaagcagtgatcttctcttttcaaaacaaggtgttgtatgcagtattaaatctggattccagaaacgctcgcacagggcgaccttgtgtgcagaagtttattgccaaggttccagtttatgcccacgaggcgcacagcgaggcttctggaggcagcagcttgcttttggcattcccttacagagctcagagccccgacaggttttggctgtaagaagtatcccgcaactgatttattcctcaatttcaattatttttttctctacatgaatcatttccatgtttccaaagcagaagtagaaagaaagaaaaaaaaactcataaggtgaaaaaaacttccaaagtgttttgttttgttttgtttgtttttttattgaaaaaaaaaaaaagcctgcaatacaggaatggatttgctatcaaacatccatttcaggaaaccaccaggtagaatcgggcaatttgatgggcaattgggtctcaatttccccatcaggaacaacgtctgtgcacacacacatacacacattcactcccaagccatccacctcaccagaccatgagcttttagggagaccgaattccagccaggaaggcagtttccttttcactgtaccaacataatgcttcattacaccaagacacagcactctcccatctgccaggtcaataaagaatgaagcttaaaattcacagtcacctttacaatgctaagcatttcaaccttaaatgaatgtgcagtccaccaatccgcttccccggcctgcatccagctcttcccgtagctgaggctcaaatgatcttccacggggtccattagttcctcttggctggtccctgggttcaatgcaacgctcccagcaggtacggtaactgccactcatctgaaactcccaagttacactctgcctcactgacaagggcatggggcgctgcctcctattctgttttgtgggttctttgatcaccagaaggaatttcgagccactgtgctaagtaactcgaattactcataggctgggatcccagaagccgctgggttcctccatataccatcagaagctgagcttctccagaggacactgaagaggctgctcaagaaccctacagcaggttgtcccagaattacccaccatgacctaggtagctgactaaatgccacagcccacctgaagtttccccaggcaaacacctggagtgtctcatgactaagcaagatgtcctatggagctaaaaataaccctcctatcccttcctcctcctgccatccccatctctctgaccctctgtggtcctcaaagggcatttaagatttgagtttcctggccagaacgtgggcaagtgcttgtatttatttgctatttactaactgctgccatagtagatggcgtttctaaaacggtataaaacatctaccaacaacatcaggtttttggtattctatatgtgactgttaaaataaaaatggaccttggctacctataatgaatgagccaagtaaaagcactccaatcctggcgtccaattctatcagctgatatttgacacagggtttgacagttgacaaactgtctctccatggttccctcttaacagctccatgaggtggcagggccagtacaatcatccttgttttgtatctgagcaaaggacattgtggagagattaagcaaggctacaaaatcggtgaaggattccgactttccactacagcaagaggtctcagtgcatggctagccctaggcgatgccagaaacatgacgacataagtaatactttttttaatagcaaagaaagcaagccagtaagatgtccagcttgggaaatatgaagttggcaaggacaaaagatgcctccaaattttaaagaaaaaaaaatttctctctcggttaaccctcactactccatcaagagtaacagcagagtccaggtatcccctggaagtgggtcaggttcgggtctgcactgtcttccttgcttccaggtaccttcctcctcccaggccgcacggagtcccgggcccggctccgggcgctgtgtttacaggcagggcggcaggaaggacatgacctccccagctctgcggcaggttaagcagcctgattgaacgtggctgctaattaagggcccctcttgtctggcagggccaccagggtaccttctgcacttgttcatgaccactgcacctcgctcagaaattaactcttgatgagtgcagacaggggcccagctggtcctcccgagtcctcccaagtagataaatgaagtgtaataagaatgccgctgactgccaagggaagaggggctctccgtgacctcttggtaaaatccagagtatacttttactatgacttaattctctgcactggggacacctaacgtagccaggaatggtgtgaacagaccactagccacagggacagcatagaggcgtccatcactagacgtccacttcatgaagtaggagttaaaagaataaagaggtaatttatgagaaactaattttcaattgacaaatattttcaggaggtgtgatgacctacttttctccataactcttcatgggcccagggacaatggtggctcctattacagtttgcaaatggtacaatcattccgctcaggtttaaaatattaaatgctcatcttctatcacttacagagggattctttccctgaagctctatttaaggagagggaaattgcggccgtcattgtccaggcctcccacatacagaaacttggtagacagacatgttctgggtcacatggctaagctgtactgacatgctgctcgagtccagaggtatcgccattgagttcagcacagtcaggaccagagccttttccaccattcatctcaggaagccaacacacacagctggtaagggggagggcttggagctaggagactgggaactgtgtgtggtcagaagccacctcactgccctggcccacagtgtggttccctgtgtgacatcatctttgagatatgacagagacaaaaagcaggctgagagtccctgctctggactctagatcacaatgaagccacatctttctacaacttttgaaagaagcaggtgaggtttccgaaaaaaaaaccaagtgaaatgaaaggtgacggtcagtgtgctatcttttgaccgcacagcaaaaaagtggttgccgggctagaagcaagatggaaagatgaagaaatgggcagaaaaggcatttggtgccttgatgaaaaatttcaaaaataaaagggtcccatggtgaaactagagcaattcccagaagactaaatgtgggaggaatgggacgaggtaggggaagtcagcagagactctaagttgtttaagagagcgtattacttatctattgctgtgtaacaaatgaacgcaaaactaagcagcccgagacaacttaagaaacccacgatttccgtgtgcctggagtctgggttggctcagcaggatgcctttagctcagggtctctcacaaggctgcactcaaggtgtcagcgggcactgtggtcatctcaaggcttgcctgggggggtggctccgcctccactttgtcccttcccaacctcatctgtagtctgccacaggcctcggtgccccagtagctgctaatcttttgccatggggctactcatagcacgtcagcttgcttccctcagagctgggggtagggagaagaggaaaagcaagcaagacagaagtcacccagaagtgcaaaaaaggagttgccatcccattacttttgccatatttgatttgttagaagtgatccagtaggtccgacccacctgcaaggggagaggcttacgcaagagcatgaaaacctgaggacagagaccaccaggaccaacaaaggctgtggaccacagagacactctttattcatggaataaacctggagcccgattctcccaaggcgagcctcctgaaatgatagaagctacggagggaggccacatgctaggccacatgtcagcattattactgttcatcattcattcagggcccacaaaagcgagagcatctccatacgggtgtggattttaaaatcaggaaagcaggccagatagaattcatgcttaggcacagctgctcagaactgaccaccctaaggggcccactgttaataactcatcctttctgatgatccgcccactgcctggtgtggctgctgccactgttcagctctgtcccctgccctgagaaacatgtgctgccagaggttcgtcctcacaataataaccgctaacactgagtgacagcatgtgatggtcaagtacagagtctggcactttatgttcatcaccgcgtttcatcctcaccacgaccctgttctgtggatccggctggacgcatccagaggtgggagtccctgtggtctgggcactgatcagtgcctgaatgttctcagggacactccccttcattaaagcagacagttagacattaacaggtctcatgactcaatatataactgaattgttatattatgggcacattgcacaactgttcacttagaaaatctaaaagaatcagctaaaaactattagaaaaacttagtgaagtgtataaaatgaaacactaccgtgccactttaggactctggcaatagctaaaaagtaagttttgtgataactcatgttcattgtagaaaatctagaaaataaaaaaaaaaaaaagtaagactaaggcattaagtcactcatgactttaccaaaagacattttggtatattttctttgatgcatttttctatgttacatgggtgactatatcattgtattttaaaaaattgttgtcatactacactagctgagcatcttgcttttttcacttaatgtaacattgggagcattttcccatgctcatgttcttcaaaaacccaaggttaaatggttactgaatagctcatcatattattacaacctaattttaaaaaactatttccttttactcatttagtcaaaaaaatcaaatttttttcctctgttccccatttcctgtctttaaaaaattatttgaatatccatttcagttcttctattggcttaacacatatttatttacatttttaagttggctgcaagttagaaatataagttttcacagtctgcctacagtcagtactgtacaacctctataataaagaactcttctcaccatcgaggtccgtatctacccctggtctttaccttacagctgttacatgtatctcatctatagatgttataagcctcgcaagacagtgttataatttttgcttaaaattcttatatgattaacaatgaaattaagaagaaaaaagcagaaagaaaactagtattttgtgttgatccaaatatttaccagtccagtagtctttactcttttccaaggacctgagttcccaactggtattatttccctttaactgaaagaagttcctgcagcatttcttacagtgcaggtctgctggtgataaattcttttttcttttatcgaaaaatgcctttatttcccttcaatcttagaaggatatttctacaagatataaaattctgggttagggcaggcgtggtggctcacacctgtaatcccagcactttgggaggctgaggcaagcggatcacttgagggcaggagctcaagactagcttggaccacatggtgagaccctgtctctactaaaaagacaaaaaatagctgggtgtggtggttcgcacctgtagtcccagctactcaggaggctgaggcaggagaactgctcaaacccaggaggcagagattgcagtgagccgacatcatgccactgcactccaacctgggcaacagagcgagacctcaacttaaaaaaaaaaaaattctgggttagaattttctgattctctttcagtaccttgaaaatgttattccatgccgttctggtctgcaaggtttccagtgagaagtcagccattaactggattattactgtatggcttttctcttgttgctttcaagatttgctcttcaactttggttttcaaaagtttgcaagaaccagcgtgggatttttaaatatttattcttattggtgtttcttgagcatatgatcttatatctgtaaatttctacttgtcactgaattctgaaattttttagctattatttcttctactatttttttctgctccattttctctttttcctctgtcattttccccctctctgccttcagctgttaagtccactcagtaaatttttatttgagataactattttcagttctagaatttccatttggttcttctttttatcattctatttctctgctgagctatcttatcttttcattcatagtgagcatatatcatgttatttcatttaggatagttttgttttgctttgctttgagacaaggtcttactctgtcacccaggctggagtgcagtggtgtgatcatggctcactgcagccatgacctcctgggcccaagcaatcctcccacctgagcctccccagtagctgggactacaagggcacactaccatgcccagctaatttttgtattttttgtagacatggggtttccctgtgttgcccaggctggtctcagactctgaggtgggctcaagcaatatgcccaccccagcttcccaaagtgtcgggattacaggcgtgagccgtggcacccagccatttagtatagttataacagccactggaaaaccttgtgtgactctccatatctgcttccccttggggttgaacttcatttgatttctctttttcttgatttgagacagtattctatttccttggttcttcaaatgttggttattttagctttgtatcccagatgtgaggaaggttaaactgtagaggtttgggattttgcgatttttcttggatgactgttagttcttttggttggcaattagctgaacctgaactgcaaactctgaccctttcggcagcaagcacagatttttttgtcattattgtgatctgagtctattctatgcatgtatggttcagcgatcaaagatgtatataaacagaatttggggatcccctctccagcccttttcttctaggagtccctctcactgcaccacctgcccttggccctgagcttacttggtgcagctcaagagtgcagctcaagacccaccttgtcccaacgaggttctcccaccataaacttgcctgcttctgctcactctcaatggcttcaggcagctgctttctgaattatacccagttttcatagttattttctgtatgtgggggtgggagggatggaggtgggaggatctgtctggtaagatcttgatctgccattctcagaagaagaagttcccagacctttgtatctaaataccattccccactaaaaggaaccagagttccttctaaaaatgtagaaagtaaaatataaaaacagctcattccagagctgggtacaaggttacgcctggaataccttattatgccagagagtgaggaagtgatcaaagatccaagaggccctgtcaaaaggagatgggagcctacttttcaaaccaaatctgggataatttgagcaaagagaataaggatcataattaataataaaattctgaagaaaagagagacttaatagtccacagtgctgattgagaggaaaaggaagagaagcatattactcatttaattggcagataaaactgaatgtatttgtcatgtacaacacgttttgaagtacctacacattatgaaattactaaatctagctaattaacatatgtattacctcacactgttaccatttgttacatttttaactgatgacgtatctctcatttattggactgataacgtatctattcctcattcactggattctacccagaaacagcacactttcaccctttcatggtacagctgccatgctcttcacaatgttattattctagactattacagtacaagctagcagtgacctatttatcttttaggatcatgaacaatatatatcacttcatttctagaaactgatcttcaaaaactataacctactgcaggacaggtgaggccagggaggcggacacctctgcctccaggaggctactctgtgcctcaagaaccaaagaacgaggggagttcgaccactgcctgtacagagcccgaatgccctccctgctgctgttctaatgcatgtcccatctgcaatgttagaaaacaagcttcagcttgatacagtggaacttggcagatggcacagtttgcttgttacagaactaagtatgaaaataaattcatttagtagtgctccttggagaaatgtggttcagaagtcaaataattttaaaagacctctttcccatgtaagacacccatgaaacaatgctctggtcataattagtctctaacctttcaaaatgcctgcttcagtgacctcacctgctattgaacacgatgcctgcagatggtgtgaggtggccaaagggtggaggactggcagcgggggctgcagcggctgctgtgaccagccactcacttgctgaaggatcagggagagacactgtgtctctctgggtctcggcttcttaacctgtgaaacccaggggttggggaaaagctcgccaagcccccctcctgctttggcatcctgtgagtctttattgtcctgggctagctgggacccctaggacactgggtggctccttccaccccacatgatcattctgctcaacaagaacttgcaggagccacagacctgcctcacaaacatgaggaagcgcatccttctacaaagcgagaggcttgaggtgtgtgtatagccaggtcaaggtgaaagctactgaggttttgcggaatcaactctgtatcaaatcttctctctctatccttctcagagtctgatcaaactgggaggtaacagattctcaacaaatctcaaggagagggaggaaaatatctacctactatggaattatctgtaatttttctaacacacagagtatgttagctaaagctttaatgccccctatcctttctgtcacttacggtacgctttatcctttgatttttgatcaactgttagtcgcagaatgaatatgcctaaattatcactgaaatctagcaaattatgtcttagaatgttagttttaaaaataagtttgaaaatcatttttatgagtctttgtaagctcaaaaatatagctctcattattttgacttagtttgtttaaattgctaagaaaattatttcctcaaaaaacagacactgtactcttcaccaaatttagtatgttgaaaactgaaaataagaaattacatatgaaagagcaagccagagacaacataccaatatacagaaaaaatagaggaaaaaaatactaaatttttcacctctgacttttcctccttttaaaaagaaaaaaatcagggctggcgcggtggctcccacctgtaatcccagcactttgggaggccgaggtgcgaggatggcttgagtccaggatttcaagaccaacctgggcaacaaagtgagaccctgcctctattaaaaataaaaaaattagccgggcatggtgctacatgcctatggtcccagctacttgggaagctgaggtggaaggattgcctgagcctaggagttcaaggttgcagtgagctgtgatcatgccactacacttcatcctgagcaacagagcgagattctgtctcaaaaagagaagaaaagaaaagatctaccagaagccttgggtccctgttttctggcaatatgctatgcatatttgcaaatatgtaaactgcatggataattttgctgtaacgaggaatgtcactttaccagactacaactttaatcagcattcctctgaacaaacttgctcatgatactaagcaacgcaaacatgcagccaaacaactggtgttttaatattctagcttctatttcttccacgtcataatttcctgtaataatctcactcatgcctgaactccacagacattcttatttatgtttttcaggtcagtatgccaatagcaagaagacttgttcttgaaaggttgagtttttcaaatgagtcctgaaagaattctaccacactgcctatttcccaagcagggatcatgggagaaaggaaattttgaagaaaatggttctaatgccattttgttaaaagtactgagagatttacaatgatcaagtaatatgccagttctttcaaaggatgccaacatctgatgccaacataattacaagttggaaaaatgtgtaatgaatcaggcggctcataatttcccttagaatatgtatgcacaacttattaaatgacataaaaagcaaagagtcacggcaaatgttgaaaccttaaatctgagtttcattgctttggggcattttcgtcaaactccatcatctggaagtacctaacaataagaaatattaggtcacaagctgttttagaaacacctgtaataccttcacctaatgaggccaataaacgagagcttcgtgttcctcatcaaataagaaaacttaatagtcaaatctgacataataagcccaaactcaaaccctgtagaaatggaaacactcacatggagagcattttctcctccaaattttcgattctgccaggtccctcccctaaagccacctggtggaaaaatgtgcccccagtgctaggtcagtgtgggtttcccagagtagggcttaattcatgtggtggtctttggaggctcagaaagaatagaatagagttttctcttgatggtcactgtcctcacctcctcctgctctcccccaaacacactacaacctaggtaaggagaaagaccctactgacatcttattcaaaacccccaatcccacccctttcaaggtacttgccagggaggtaaatggtggactctgcaggtttcctcctccaaaatcatttgtatactttgtctatggtcactgtctccccaaaagggctatactatcattttcttccaactagggctgtcagatttcacaaagaaaaatacagaatgcccatttaaatgtgaatttcagataaacaacagataatttcttagtatgtctcaaatcatgcatgggatatacttacactaaaaagctatctgttgtttatctgaaactcaaaatgaacagggcatcccggattttatctggcaaatttatgcaaaacattcataatatggggaatgagaaattaacacagttacctctttctggtagtccaggaagtagagaaaaggcagctctaagaaggggtagaggtgagaaaagggaaaatgtaaagagaaaataaagccttccttattttggtagaattccatgtggtcctttacaaactttaacgtgcatacaaatcacccagggacattgttaatttaacatgtgggttctgattggatagggtcgtggagtctggaattctccatttctaatccctctccaggcaatgctgatactgctggttcaaaattcgtttcactggtaacagaattccagcctcctttattccaggaattgcatggggtcaaaggcaagaagacccggtgcaatgggtggagaagcaggtggaggagtgggggccctgtgagggccagggaaggccatgtgagtgtgtggatgtgtggctgagggaaaggaggccagggatcaatgaagctttgctttttttttttttttttttgatggagtctcactctgtcacccaggctgggatgcagtggtgcaatctcggctctctgcaacctccgcctcctgggttcaagcaattctcctgcttcaggctcctgagtagctgggattacaggcatatgccaccacatcccactaatttttttgtatttttagtagagacggggtttcaccatgttggtcatgctggtctcgaactccagacctcaaatgatccacctgccttggccccccaaagtgctgggattgcaggcgtgagccactgcacctggcctcaatgaagcttttctaacagtgaaggtgaaatacaaagatttggtctcttctgaggtttcttctaattctgcactgtgagaaataaccactactgtcatccacactaagacatgagttttgagcaacaatagcaacaacaaaaaatgcacacacagcaaaagcagcaaacagttttagacattcatgcttctcatattattactgagaaacagagcagtacgcttaagaatccaacacaaatgccttgtcacatttggacaaatgagtaaagacgggggataggttgtgtagaattcatcaaattggtgcccctaaaaagtgaattgagatttcgggacctggccatggtttgacccttagtgatgtgtgtacctatatacacaccaaaacaggcactcgcttcactttccaaaagttatctggagaaaagttgttctagttcagagtgtttacatagaccaaggatggtcaactgagactccagggcaaatacatgagatttttaccggttcctggatacctttgactcaagacagaaaaaaagtcattaggaaaatggtaattattcttgtcattcatagaagcctacaattctcccacccaggaaattccactactcaattaattgattacatggaataggatgcctccactagtcatctagtcaaatgtggacactggtctgggttttaacttgtgggaaactgtttttctttaactcaggggactctaaagtacaatggctaagagtaccagagtcagactacttgtgctgaattctggctccaacactgtctccctgggttccatactactcttagcctcagtttttacatccataaaaagggatcaataaaagaatgtctgactggggcaacatagtgagaccccatctctataaaaaattttaaaaattagccaggccagacatggtgcatgcctgtagtcccagctcctcaggaggctggggtgggaggatcacttgagcctgggaggtcaaggctgcagtgagctgtgatcacaccactgcactccagcctgggtgacaaaggaagaccctatctcaaaaaaaaaaaaaatgtgactgtcactaggctgctgtaggggataaacttaataacgtatgtctaggaaatacacaggaggagttcagtaacgttgcctgttaataccttgtcactgtagttactgtttctttgctactttgcatgaagctctgaattgctcagtgttaccctgaagctggggactaaccatccttctctggattgccttctgccactcagccattctagtaatcaagctaagcctctactgaggtcccaggacacacagttgtatgggtaagccaatgcagccaatgaaatgtgttgtagatatagaaaatgagctatcggaaacgctgacttcaggaagtggagatacatggcacagctccaaaggcaagaagctcatagccaccacgaatctagtaagtcctccctgcttcttgccttacatccacaggtgtgagggaaattggtggtaaaaatttcctttcccatgactcgtaagcttctgagaaaagccttgtgatgatatactaagtacttcagcaaaggatcagaggagtcagctgtgagcactgctcagatcccagtaagactttcagtggccaagattaaagctggcttccctctgccacgccaagcaacccagcctggctacagtacagcaggctgctgcaggaacttttcagagcgaagagtaagcgttcgatgaagatgtagactcgattagagtggaagatggaagcagcagataacggatgcattacataccatactcttttcaaaatgaaaaagcaactaacatgcaatccttcaatataaaggtagattataaacatcggtattttttctttttactcgcacttggaattactttggttgtaaccatttacgtctttgctcagtctggatttaatcggtttctctgttcttccctgtaaaactgagtctttccaccaaatgaccctgcattcaccttaatttgattttctgggttttcgtcttttaaaagtcatcacagatcttatgccatagttgtgatcagttctccaacatttgtctgactatggctcaagattaaaaaacattttcttctaagatgtgagatctcctaattctccaacactcacctatcctccacccaccggcatttctctccctcaccctgctcctccgcctgcttcttcacccactgcactggggcttcttgcctttgacatcatgcaattcctggaataaaggagactggagttctgttaccagtgaaacgaactttacgttagagacatccaaactgtgtggatttggtataagcttctttcaaaaagtactactccattattgggaatgtttatgcctaaaaaagaagattctgtgttctattgtgtcagacgctttcaaagtgcaattgttcaatttgcaaactgcaattggttaaccaagctaaacttaattagtccaacgatcctacacatcaaaccctactgtttgatgtattctgcgagatgtccaagccgcctacagctggctaagggtcacaatgaaaaggcagccaggcttaggtctgggaactgaaatgagctgttctaagtggagcttttcttccattttctgaggctgcactgctctgaccttctccaaatcaatcctttgcggattaacatgtaaagcagtgtcgaattaatttcagaaagggaatatgagatcagcctaggatcatacaaaacatctaactcctaaatacactaatgcttctagccattcaatgagaagctgtcaataaagggaaaaaagtcggtgaggggggcggccagaaggatttgaaggttggagcaatctatcagactagttagcacattgcctacttctgtggcatggctaatgcattcctctagaagttaatcctatttctaaagaccctcccgcgaggagcacataggccgtgatgaatgagaactaaaatgcattaaaattctcaacaacttcaccaaaaggcacactattagattctgagtgtctaaaataagacggttcattaaaagtgcaggtcttaaagaacccgcttttgtccctacacactggggagagaggggccagtgtgtcacttgtgacacctgcagccaaaatatttttacattaggttgtccaagtaatcacatgagaaacactacatgaaacggcaagggaaggcctttttcacaagcgagcttaaatagcgttattatgtgcctacgctgggggaggatgtgtttccccagcattagccacacaacggtgtcattaaacccacttttaaaaaacagacatgaaagagcacttaatttcccttggaggagcggcggtatttgaacacttctctttttctctcattgtattttgcttgtactcaattaagagataatttagccatttatcaagatggagtcggggctgagcatttatacaggcatttactgcagctatccttacaggcgaaaatctgaaaccatctccagaagacagttcatagcggtgggcctaatattgactggaaattacaccttgacgagttagttttgagtctctgttaacagcacagggtatggctggatggccctcaagactgactgcgacaaattataaagcaacgtcgatgctaacgccagaaacaccaaggacgaaatgcttgagcccctacagaactggcaggaagcagcagcttaggaggctccgaaagatgaaaacacaaagacagaagcacacctagaaactggagggaatccacatggtgtgtttgttaaatgaatgaattaaagagagaataagtagactcagattgccacctggactcaggacatttatagcaacttaatgggctgaagttttgcaaaagttgatcctcagtgctaaacatcaggtccagcagaagggttccccagaggggtgtgggcatgggaggatgagagaggagcacgagggatgtatgatcctgcccactttgtttccacgcttcataatgaacacctgtgctgcatttactcttctgtatgaatcgaatattacactgaaaaaatctgaaagtaatacttcctctgacctttcgttttcacatcagcatctaccacttctttgtagggtcatcaatcctactataaacagtgttatcagtctaaactctgctatatctgaacattgtaataatcaagctatgatacggacagtatcatttacggaaagcttctaatacagcatctgttttacacacacactatctctaatcctcacaatcctttgggcaggtggcatctttgttttacagacagaacaactgaggctcagagagggcgagtcaggtgttaaaggccacacagctagcagccaccactgagaggattaaattgaggtctgctgggctcccaaatccatactctttccactttcccataaagaaacagtgcaggggaaaacataataccatgtatctaaaagaaagaaaaataactaagaagttgcacatctgaaagattgcaagttccctcaagcttaaagtaaaaatgcttgttaaatgatagggtcaaggattttatgaataaataaaaaagagccatcctacctaagccagataaagtgcactcacagggcagcaaaaataaaccagactcacgccatgtcagggtcccaccaaaagccaggctgtgcgacccatggagatgaccaccaaccagcacccctccctcagtgagaaggtgggtccttggccatcgggaatgaggcaaaggaaggggcagggcccagggagcagtggcctggcagccccttcccatgagttggggactagggggcaggtagtgatagtgaggccccgtgccagctgcagcggaggaggcatggttgaggctgcacctctacagagctggcaggaactgggaacaggtgagagccacgcccccttccgagttgaaggggctggagccccactctcccaggcgcagctgctgctgcccagccacggccgggccgccgactgggattcctcgcgctgtcagaggccccaggaagcccccctcccccacaggctcagaagtgcctgctcctgctgcagggcctgtccctgctcccggcacccactctgatttcagagcaaagttgtggccaagcccaggcactgtcatgacccagccaggtgtgcacatgctcagggcggcgctgacatgccagccccctgctgcctcagtccccactggactttgggcaccaacaagcacaggcttctgggatgccaagggggcgctgagggcagtttggcacaggcctgtacgcgcccttcagcatgaacagcctgggtgctgtgggcaccgtggatgtcaggttgatggctgcagaaggcagacaggctcctgggcagaaagtgggacgtccctggtgaagctccatcttcaagtcaaggacaacctgaagcatttcttggggctggatagcttttgtcttttcgatgaccccaaaagcacggaaaaaccagaagtcagctccgtgggtggtgaccccgtggaggggaaatataaaccagaaagtaggatgctgagtgcagactgggaggcgacttcatggtctggactagtgccagccctagcgcctgggacgtgagggtgcccggcaagagggtgtaaaaagacaaaccaatgagtgcgtgggaggcctgattctcatgtcaaaaagggtggaaggaaccacgtgttcatctgacagcatcgtcctcctgtttatttcctcagccaaggactggggactgggagacagtccacttgggtgacggcgaatttctttcaccccgagctgacaccaccttgggcagggggccacagtgagggctgagctggccactgtgtccaggggatcgtgccttgggcagatctgccttcatctccctgctcttcccctctgttttttgtgtatagtaggagcacacgagaattaggaagaacagaaaaaacaagcatctttcaaggttttattgaaccactgccaagaagatgtggaagagtgggttgactacaattgctagacatccgttcattcacttattcattcagttcactggcatccccagctaacacggccaccgtgtcacacttaccaaaaaatggttgggagatttatccttggccaactctgcagaaccctcctccccaaacctcctgctctgcgctttgctccggcagtgatctcaatgacaggattttaaaacgaggtttcagtacttctgcaacccaaatgttcacatcgttaccgcttaggaatctcagttatgtctatatgatatttaagcatgtgtttaaagacacaaaacactttccgcattttgtctgaatagactgaagacttgttgctgagttttcagtacaaaaaaacaccagcgattatcctgaaactgacaagtttgaagatgcaaagtctaggctgtaagaggaattttaaacgcacgcctttaaaatgagacttgtggctaaaatggagaaagggaagggagggaaggaaagagaagaagacgggaggggagaggaaagagggaagaagaggagaaactgacagctgacaggagggtcccatcacaggtacaggagacatcaggtggcctctgatgggaataggagagctgcagccagtcatcctcaccctcccacagctgctaatgagccattgtcaggccttgtaaaagtaagttaaattattgctgatatatcttccttgtaagtaagataaggtgacaaaaggtcactcctcggcgaggtgcagtggctcacacctgtaatcccagtactttgggaggctgaggcaggcgaatcacgaggtcaggagttcgaaaccagcctggccaacatggcaaaaccccgtctctactaaaaatacaaaaattagccaggcatggtggcgtgcacctgtaatcccagctacttgggaggctgaggcagaagaattgcttgaacccgggaggcagaggttgcagtgagccaagattgcagcactgtgtgacgcagtgacggagcctgggtgacggagcaagactctgtcttggaaaagaaaaaaaaagcatcaatcctctaatctaatggatgacacacagacttcataaagcatatttatctgacctgatgggttttttaaataaacttttattttggaataatttttcatttacattatttttaatgatagtaatcacggctctttcatgatgggcttagcacatgtgatgggcaccagcacatatacatatgccctttcaaatcaatcaacagcttgttcagggatgtatggagacagacagaaatgtagtatctggatcattactattaatgctaactattaattttacctctcctagtatttcaaaatatggttatgcaggccaattatccatgcatggaaaaattcccagaaaagggaagaacaagaacaagacaagatctagctagagcaggacagtgatttttaaagcaagataactaatttttaaaacctaccaataaatacagcatttaattcagagtagggttaaaagaaataaaaacaacaaagtaaaacttaaatgtatcactcactaaaattacctgttatattgattagggcataaccactcgggttttcttgacctgtgagcctggacttctcgtgtgtgttaaagcaccgccaaatacaacaatgactaatagcctttttaaatgaatctaagaccccgctgatggtagtatacatcccaatttcagaagtgttaaaatgtgtattttagaactgatcaaacagtaatacattaagctgaacccaatcaaaagtacatttcctgcttatttggataatgatgcacaatgcctggaagagaatgagaaccaggcaaatatttactgaatcaatggatagtctaagaggtgacagtcatctgtgaaatatggaattactcgcagtttgccgacacaccatcttctttcctctctacacttgcctgggacacccctctcttagcctttcattataaggaacagtcagttcaataatacaaataatacgaatctctcttcactatgcatgaagtgatcattccttgcaaactagaaacacgaacttgttaacctccttcaaggatgcaagacgactcaggaatccttccatgtactctgcattcacaaatacgtgtatgtgtgaacttagtctacgaggagactaacaacagcccatttaccagcttcaaacgtgcagggtgtgtgtgtgtgtgtgtgtgtgtgtgtgtgtgtgtgtacacatgtgcttcagggcaaggcatgtgctatataatttattttataagtttactaccaccagatgtacagtgtcagtatcacctgtgtaaattagacacaactgggttttgtattttgcattacctagataagtatttctctgcattagagctacatggaccaggcctatttagctacttccccctcccattcttggaggataaaaacaatttgttgtcctcataggttctctgagcatctaaccctatatatagcaccaagagaaaccaaacagagcactgatgccatgtttgctggaataccaacaaggagagtagaggacaatgagtagaattagtacaaaaataagccaggcatggtggctcacgcctgtaatcccagcactttgggaggccgaggcaggcggatcacctgaggtcaggagtttgagaccagcctggccaacatggtgaaaccctgtctctactaaaaatacaaaaaaagtgcacacatatgtttattgcaccactattcacaatggcaaagacatggaatcaatccaaatgcccattaatgatagactggataaagaaaatgtggcatatatacaccatgtaatactatgcggccataaaaaggaatgagttcatgtcctttgcaggcacatggatgaagctggacaccatcatcctcagcaaactaacacagaaagagaaaaccaaacaccacaagttctcactcacaagtaggagctcaacaatgagaacacatggacacagggaggggaataacacacactggggcctgtcagagaagggaaaaggggagggagagcatcagaacaaacagctaatgcatgtagggcttaatacccaagtgacggattaataggtgcagcaaaccaccatgacacacatttacctaacctgcacattctgcacatgtatcccagaacttaaagcaaaaaacaaacaaacaaacaaaactctgatgccatctctggcatctcaggcaatttctgctttttctaggttttgttttgtccatacacggtacagacttcctccacagagggattttacgagaactagaaccaacaggaaaaacttgggtgagaggtactaacataattaacaaaatgaagaacacgccaactttcctaaccagggaagaaacacaaaacaataaaggaagtcacatttccctccttttcccatcactgaagagacggcagccaaatggtcatgctcacatttggtgcatgaaagtgctctggcagtaatgatctacaggcagtcattggcatgcttatggtcactcacttgcgaccttgtttcttgagtttgtcctaaaacttctttttgaaagaaagaaagactttgacataaaaatgttcaatgtagcttcagaatcacaagaattagaaattacctcaatatctaatagcagggagaccactaaggaaattatagtatgaggccaggtgcagtggatcacaccctagaactttgggaaactgaggcaagaggactgcttgaggccaggaatttggaaccagcctggacaacatagtgagaggtcctgtctctataaaaaataaatacgaaactgatccaggtgtggtaggatgtgtctctggtcctggctacttgagcggctgaggcgggaggatcacttgagcctagaaggtcacagctgcagtaagtcaagatcacaccactgcactccagcctggacaacagagtgagactctatctcaattaaaataataataattgttattattattgtctttgtgttaacctattcttgagactggtttggttctggtgtgtgtgtgtatgtgtgtgtgtgtacacgtaaatatacatatatattgttctacgtgattaaaaaaatacacttcattcatcttccaagtaagttagccttcttgtttccattaaaatgcaggaggtgggtctggttctaccaaccttgctcgagatttatccccaggtcacccccgccccaggactctggcagagctagcgtaaggcagagcactggtggctgatcctgatgtcacctgcaggccacatatgcatctccaccatctccagacgtcggcaatgccacagcatgactctggggatacagcttctagacaataagcagcaagttagagactagaacaatttcacggataaaagacacctgctggtgatatatgacttcaaacaatgaagaggggactagaaggctggcattctgccaaccaacacctaagagggcaggggagccatagagtggggacagtaaagggcgggacactctctcccaacaaccaaggaatagacccacctggaaggcagagggagtttcttcactgggtacaaggaattagagtaagaagttattttttttttttaattagaaacaaatgaaagaatcccaccaacttcactctgtgaactatgattttaacgttaagagtaacaaagatgggaaatctatcaaaatcctcaattttgtattacactgcacactcgtgaaacagttcctaacaagcctagatgaatttcagttcttttaagccaacatttgaaatacaggtccccagtcccaccccttcctcagcagtggcccacttcggtggctgttttctaggagttgttcctggagttggtctggagtcagcacctccagccctcatactgatctcccagtgagatacgtggatctccagagttcagtactcgctacactgatggcactcagaagtttgtggaatgaatggacaaatgaatggatcgttatgcttcactggagcaggcaggatcaaccccctggaagggttaaagaaggtgctgaacgaaactctgcttttcttgccttcatgcttccttttttccaaaagggtaaaaagtagctgcattaaatccctttctgttcagatgtcctagaactgctacaaggcccaccacatatccccctcatctccaactagcacagggtaaatagtaacattctactgtaccacattttctagaatggctgtatatatgaagttacaattcacgctatgcactgctaatgaactttccacaatgccataaatgaaatatgtaatatcatgactcccattttacaaatgaggaagcttgtccaagtttacacagttaacagcggaactgggactccattctgctatactgcctcccagtaaaagtttacatggtgaatacagaacaaatattcaaaagagagaaagaggggaaacagaggtgacagaggatccagtgttggcttaataggtataaacatggtctgagcctgattataggcaaaagaaacaaagaagagcagaaaaaaaggagtcacatgcatggatagcagggtgctacaaggatgtctaataacacagacctgtggcggggagggtcacaggataatggcatgcttaaggcggcccaatagacacaggagaacactgatgcttgctggcaggctgggaaatagaggtgccttgaagaatccatggggagcttatactggaagtctgttttgggagtaaaaaaggatgaggagtgtaaagttaaagaaaaggactgaaggccattagatgttcttcagcgagcatactcagctgttaagtcaaaaatactgctgagctgaggccgggcacggtggctcacacttgtaatcccagcactttgggatgccaaggcgagcggatcacctgaggtcaggagttcaagaccagcctggccaacatggtgaaaccccgtctctactaaaaatacaaaaaaaaaattagccaggcatggtggcagatgcctgtaatcccagctactcgggaggctgaggcaggagaatcacttgaacctgggaggtggaggttgcagtgaaccaagatcgcgccactgcactccagcctgggcaagaaggtgagactccatctcaaaaaaaaaaaaaaaccaacaaaaaacaaaaacaataaaataaccaccgagctgaaagagatgggcatacaattcctacagcagaaggaaactcagttctccgggggcaatacttctcacttacaacttgagtgtgctcattgaagaaaccttggtgacctttagggattttctttaaattataccccctatccttttcgtacccccaaactcagtggtaagtatttttctttttctttctttcttttttttttttttgagacagagtctcactgggtcatccaggctggagtgcagtggcgtgatcttggctcactgcaagctccacctcccgggttcacaccattctcctgcctcagcctcccaagtagctgggactacaggctcccgccaccacacccagctaattttttgtatctttagtagagatggggtttcaccgtgttagccaggatggtcttgatctcctgacctcgtgatctgcctgccttggccccccaaagtgctgggattacaggtgtgagccaccatacctggcctcagtggcgagtatttttctacagttgtttcatgttctgagaaccaggagaaggatatttaatgttgttgggtgtgcaagttcaggtctgattcagcgggttcagaagtaactgaataacagcagggaaccagtatagggaatatcaacaagggagctgagctttgctaataggccataatttatttaaaaaaatttagtctcataactctagagttcagtacttggttcactgatggcattcagaagtgtgtggaatgaatgaatgaatgaatgaatgaatgaatgaatgagtgaataaatggttatacttcactggagtcggcaggatcaacaccctggaaacgttaataaggtgctgaacaaaactctttttttcctttattcttccttttttccaaaagaagaatagcctatgaagtaattcttcttttccctctaactgcaatagatacataataccatattttcactaacagcaaaaacaattcacattagaaggggttcttccattcaccagagttaattttttaagtggataagcaattaaagatgccaagtagattaaaattgatccctagcataaaagttgtgatcaataaaaaaacaatctgtaaatttgattgcataaatcctttttacttaagtccaccataagcataattttcaggatcactactttgatctcacttactggaaaataaaatgcaataaaaatattgctgcaaaacctagtttctagaaaataataaataaaacatccattttaaaatttttgaaccacccatgggagacaaatgcacaatgattagactatgctactactaatcaaggaaaatgcaggattaaaaagtcccttgggatctagccaagttcctaaactaacaggagaaatgctttctgaaatgcagcttgttttatttaactggttccaacggccccttactggttttcatggtttggcaactttacacattgtctttggattcttgctgttaggatctagctcacacatcatccatctctcctcctgctcacttacgcatctgttgtcagttctactggattcctgtgaaactccaaatagcgtacttcactgttttacctatgagatgtatgtcttgctgctcagtttgtatgagaagcacaaccacactcagcttttcagtccctttcccctcctctgcttccccgcccacctctgtcaccctttaccttgtcaaatgtagtaacattcacactctgttcagtagcaactgttatctttcatgatttgtctccagattcattaagttgacacattccaattttgtgtgtcatgacatataaacataatttacagtattaactatacagatgatacttattacaagagaatgcataatatacaggtattactataaatattgtcatattactagatattactgaatattaatatactatacagatatttgtaactatgcagacatttataatcctagtttgttaggattacatttccttctcaatgggttcacggtgccatccaatggaagatgtttctagtatcaaaataaaaaagaccctgtctcctccctcatgtaatttgcttttatttcaagatactaaaaaacctgagagatctccccactctattcccttcccagagaggacttacttaagttccagagtgaagccagcccctctccccggccctctcccgcagagggaaggaggggcaggcacgcagctacactatatgagctcacgtctgatggtttagggaccctctcctgtagtacaacccggctgcacatgcacagggttagaggctgaactgtgtccccctaaaaattcagatattgaagtcctcaacctcagcacctcaaaatggaactgtatttagagacagggtctttccagaggcgattaagttaacatgaggtaattcaggtgggtcctaatccagtatgactcgtgtccttgtaagaagaggacatttgaacacagacacacacacaggagaggtgacaggaacacacagggagacgacagcctctacaagccagagagaggggcccggaacagagcctctctcacggcctcagaaggagccagccctgctgacaccttatcctggacttctggccttcagagctgggagaaatgaatgtctgttgttgaagctaccccaggctgtggtactttgtcccagcagccctcgcaagataacacacagagtaacatcagccttttcccatccagtcctgtggtaacgggagcattaaaaagctctgcgaggaatgcgtgctttgttcttagactcagagatcccgtgtttcttgtcagaatatatctttctctgtatctgtagctacagacttagcagcagggagctctgtgtagcacatagggcttgtcaatagacaggtttcactttagtaaaagtggagacaggggccaggtgcggtggttcatgcctgtaatcccagcattttgggagactgaggtgggctgatcgcttgagcctaggggttcgagaccagcctgggcaacatgatgaaacccgaaaccttgtctctaaaaaaagtttaaaaaattagcagggcatggtggcacacatctgtagtctcaacaactctggacaagcccctggaagttgaggctgcagtgagccatgatgatgccactgtactccagcctgggcaacagagtgagaccctctctcaaaaaaaaaaaaaaaaaaaaaaaagggtagacacaggtgatccctacatccaggatgaggaggcttttactctgaggtatctaccctagttatccccagaaagccattccatttctttaaagggaggaatcaccctaaggcagcttcatcattgtcatcctccacctgcttttcatctccccaaattcggtttaaatcttatctgctgataaccacctttatttcctttgatgttgtagatgtttaactattagttttgtataatcttttcggagggttttaagaaggggagaagataaactcaacacgtgatcccatggccttattcaagtagaagctccaatctattttttttaacattgtttcctgatattaaatcaaataagagatgtagggttctcctgattacaattaactctctcatatggctaaataaggacatgacaagttatgcaaaacgtttctttaaagctctcttgaaagtgttcaaggaagtgggaagacatagaaatctttgagggtagccaaagggaaggaaataaattacatgtctcagaatatagaaataaagttactgggccggcatggtggctcacacctgtaatctcagcactttgggagggcgaggtgggcagatcactacaggtcaggagttcgagaccagcctggccaacatggtgaaaccctgtctctactaaaaatacaaaaaacattagccaggtgtggtggcatgcacctgtagtcccagctactcaggaggctgaggtaggagaatcacttgaacctgggaggtggaggttgcagtgagccaagatcatgccactgcacttcagcctgggcaacagagcaagactccaactctaaaacaataaatcaatcaaaataaagttattgtatcacagcagctatgtcatctggaaacaaaatattctatttaggtatggagtggtttagggttaggtctcctttatgagtagaagggaatatatttaaaattttttttaaatacaatttcctatatttcagtttcagaactggttctaaatcactggctctgagcaatttcgctagaaatgctccctaatgacctgccctgagctaatagcatcgagatcattgattagacacaagacaaggagcccaggacacagggcacagctaagctttcacagctcagattttcagcctttccatcaccacggtggaaggggaaaaaaaatcctttcagttccctgaaggatgtgttcttgcacataaattggcatttaggttcaattagatactgaaggcctggtcctttaaggccagccgggtgggttgcggctagatatgcctcggcgcctctcctctgtcctattactgggcaagtgtcctctggctgtatgtgctccaagttataacctaacgaaagggcaaaaaggtagaagagatggctgatgaggaggaagaggatggaaagaaaaggaagacaaagatttccctgactatgcacatagccagaatctcagcaggtgaaattacacagcacagagaatctcgatgaagattctaatatagatcacacaactctgaagcttttctctttaacatgagactcagttaagggttggaagggagctggtgagcaatgaaacagtaaagtacaagagggctccagcttcccgacctcactcacagtctaggctagattagcacatgccagacacagttctgttcactttacagccattgctcatttaatactcacaacaatgacactcacagtatcttcactttacagatagggaaaataaggcatagaaaggttaagtgacttgcccaaagtcacacagctagtccaaggcaaagcctcagctctgacatgggaggccattccctaactctttgttcactgttttctttaaaacatgatcttggaattactttctctcatttagcaatatcatgctaattcaagagtcagtaaaatgtgtccttgaaggtaggtacaaaaaaggatgttccctccaaaggcagccctcatcacagcctgaaccttcaaagggttgtaaggagcctcagatgcacagctgccttctctagcaccacacttttggttccactgcttagacaactaaggagaatgaagagcttgttccttattttccagcttctagaagggcaaaggaagggaataccatgagacagaggccacacagcacccaaaaatagaagaccattttttttttttaggcaaggtcacccaggctggtgtacagtggcacaatcagtccatagcagccttgacttcccaggctcaagtgatcctcccagctcagcttcccaacctgctgggactacaggcacatgccaccatgcctagctaaatttttttttttttaattttagtagagatgaggtctcactttgttgcccaggctggttcttgaactcctgggctcaagtgatcctcctacctaggcctcccaaagtgctaggattggccgggtgcaatggctcacacctgtaatctcagcactttgggaggccaaggtgggtggatcacttgaggtcaggagttcaagaccagcctggccaacatggtgaagccctgccactaataaaaatacaaaaataagccagatgtagtggcatgcacctgtaatcccagctactcgggaagctgaagcaggagaattgcttgaacctgggaggtggaggttgcagtgagccaagatcatgccactgcactccagcctgagggagagagttggagactgtctaaaaaaaaattatatatatatatatatatatttgatttggacactgactctgtatggagattttaatattcagtaaaggcagaataagttgtggaaatacctcaaataaacagaagaggataaggcatcagtcaaaccagggagggataaatcagataaaatgaagaagttcaaacataagcaagtggtaaaggagccaaagattcccaactaaaatgactactggaacaactgcagcttgaaaatatttcctgcgatcaaaatttgctcacgagctatggacgtgagttttgggaagagatgattctcctttacacaactgcccggattgaagaggatttgctagaatttagtacagtggacctgtgaatgacacaggttggaactgcatgggtccacttatacgtggattcttttccaaccaaacgcagactgaaaatatagtattggtgggacgcaaaacctgtaatgtacagagggctgacttttcctaggcgagggttccacagggctcactgccagacttgagtacgcacggactttggcgtacgccggggtcctggaaccaatccctcacagatactgaaggatagctgtatttatcccctgacacactgcagctcttcatgaatactgggagtcactatactcacctaagttctacacactgaggtaatgaggttccagattccaaatgtggaagtgaacttccttcttttctccttgtgagtgtgtgggagtctgtgggagtgtgcatgaggggagaaaagggaatgtcactgagcaccagcatgagcatgtccaagtgtgaccaagatgggccaagcattgaaagtagccaggtgggcgagtggccaagcgccagagaggccaatcccaagagtgactgagcccaggggtggccgagcctgacactgtctggctgctttcagtggtcccacagattgaggctgtgtatgaagagactcttccagcaaacacttttttttttgagacggagtctcactctgtcgccaggctggagtgcagtggcacgatcttggctcactgcaacctctgcctcctgggttcaagcgagtctcctgcctcagcctcctgtgtagctgggactacaggcacatgccagcatgcccagctaatttttgtatttttagtagagatggggtttcaccatgttggccaggatggtctcaatctcttgacctcgtgatccgcctgcctcggcctcccatagtgctgggattacaggcatgagccaccacacctggccccagcagacacttctaaggcatcctattctgaggtcaaaaatacatttttaggctgaaagatgagaataacttctttggagaaagcaatgagcagcaggaagtgtggggggtcaggagttaggctaagcactctgacacctgttagaagccttctcgagaacagaagattctcgagattcccaggtgagggtcttcagcctcatctcacccattccccaatgtcctggccggacaaaagccacaggctgggggaagagccatttctagcagagcaggcaactgcttctaagatttaaagtaaatgggggattccaagacgtctgattcagatgatcagtaaagtcactgatggtttagtctttcctaaatacagtcataaagattttaatttcacattatgtcaagagttttatggagccaaggatcttttcagtacgaatatgcctatacaaaccccacagaaatcaggcggcaaaagcaataatcataactatcaccttttgggtcaaaaacttgattaaagccaaatgacaactaaaatgtattttattagcagtaagatgaaatccagagcatatgtcaaagctggactatgaagtcataatttctctagatcacagttggaagcagtaattttatcactctgtccctccctagcctgtaaatccaaatatagttcagacagcagctctgggctgcagggtagtatcctactcactgtgagactctggggaggagctccactctcactggcccaggcaggccacacccagcctccctgctctcccgagtttatggccctgggcacctctcccaatccagggcagaatcagctgtcacaggagtaagatgctgccacacaccctggatcagctgtccccagtaggcatgccatggagtagtctaattagcctctgtgaagatgtcatgttttgtgagcaatgaggaggacctagacaattttagacatgagaacattccttcgggcatgtcagaggtgatgctctttccatgggcccttttgtgtgttcttaatacccacaaagacctgattcccatttttaaaatcaaaccaggagtcccctggcttagagtggccttctacaccccaccaccaccctgcccacaactaacacatcaccttacccaagaatgtcatgcaaatctgctcatggtctctccccactcctatccccagtgccacgtccgaaccttcattcttattacggtttgcttgtattcgtagcagagtcccacaaaagtcccccgagaaaatctcctagtcactgtgacaaaactattctggaacacggccccacttacacagctccatactggtaagggccgatgtccttccacagtcacctctcccactgcaagacaggagcaagagctacacttaccctggggctgcaacaggatgattatttgcttaccaggacagtgaaaatcctgagggaatttttttttattatactttaagttttagggtacatgtgcacaatgtgcaggttagttacatatgtatacatgtgacatgctggtgcgctgcacccactaactcgtcatctagcattaggtatatctcccaatgctatccctcccccctccccccaccccacaacagtccccagagtatgatgtttcccttcctgtgtccatgtgttctcattgttcaattccctgcacagcaaaagaaactaccatcagagtgaacaggcaacccacaaaatgggagaaaattttcgcaacctactcatctgacaaagggctaatatccagaatctacaatgaactcaaacaaatttacaagaaaaaaacaaacaaccccatcaaaaagtgggcaaaggacatgaacagacacttctcaaaagaagacatttatgcagccaaaaaacacatgaaaaaatgctcaccatcactgctcatcagggaattttttttaaggcggtaagtgtcaaggcatgatctaagcttctttctcatgtagtcagaactggaccaaaattgcctgttgaatgtcaataaacatataaaaactgcacggcggctgggcacggtggttcacgcctgtaatccagcactttgggagactgaggcaggtggatcacctgaggtcatgagttcaagaccagcctggccaacatggtgaaaccccatgtctacaaaaatacaaaaattagccaggcgtggtggcatgtgcctgtaatcccagctactctggaggctgaggcagaagaatcgcttgaacctgggaggcggaggttgcagtgagccaagattgtgccactgcactccagcctgggcaacagagcaagagtccgtctcaaaaaacaaaacaaacaaataaaaaactgcatggcatttgacattcttggtattgggacctgacctgcttattgttcagaaagctatttataaaagttttgtgaaaacctgaagcattatacaaactatatgctatactgtaaagttttaataagtggggatccttttaaatagaaacttctgctaataggcaactcgaaatccccaactacacatcatctttctactttagacatttaaaaatacagcacacaaaaaacttcatcttggccatgtccacgtcaagtaggaaaaagtccaaacagaatgaaagtgtctgaattataaatccttgtgaaaatactattaatcaagagggaattaatgttaacttatctagtgggtactattatctataactctttaatatcaaactcacaaaattagcagcaggaatataattatacttaaaaaaattattttcttagtaaggttggcccatagaagaataaggattagtaagatgcacagtggtcaaacatgaagaaatgagtgaattttagggaaatttgcaagtcggctgcaatcatgaacattgtatcaagccaagtaatgaaagccactcctgcctgggtgggctcggtccagcccagcccctgttgatactctgatgcattctgcagctaaccaagttcttacagcggagaggggaagaaatggcaacaaaatacacattgaaaacaaaataaatatgtttcctgaagccaatatctgaataatccttaggtaatgaccatttatacacttgataagtttcccaagtttttctttcctctttcttaagtaaaagggaaatccaggccaatttttaagccggataatatttagaaactattttttttaggtcatttcatcccatttttggttgactagtgtaaccaaggcagcaactggatttcaaagcagcagaggaagacattctgagctcacctggagcccaacgctgggacgcagcctccaccctcccaggaaactagacacttacattcccttgccctcttgcccttctgcccttcctgccaccaggtagctggtcacaatgggagttttctttctttctgcagtggggtgaatgatcacacacacacacacacacacacacacacacccccacaaccaactcctagtacccacattctgtaaatgtttacttacttggaaaaagggtctttgcagatagaatagaattaaattacaatcttagccaggtgcagtggttcatgcctgtaatctcagcactttgggaggccgaggcgggcagatcacaaggtcaggagatcgagaccatcctggccaacacggtgaaactctgtctctactaaaaatacaaaaattagccgggagaggtgatgggtgcctgcagtcgcagctactcgggaggctgaggcaggagaatgacgtgaacccgggaggcagagcttgcagtgagccaagatcacgccactgcactccagcctgggcgacagagcgagactccgtctcaaaagaaaaaaaaaaaaaaagagagagacagaaaaggagaagacacacacacacacagaggagttcacatgaagacgggggtagagattgcagtgaaatagccacaagccaaggaatgcctaaagccacaagaagctggaaggggcaaggaacggggcctcccctggagcctccagagggagtgtggccctgctgacaccttgatttcagacttgtggcctccagaaccgacagagaattattttcagctgttttaagctgccagtttgcaggaatttgttacagcagcaccaagaaacgtacattccagatacacagatatattactctaatttttggagcagcaaaggagcatcacttaaacagttaacagggaccaacctcccgtctttagagcaatctaagcatttgttctctacaattagattaaatgggattaaacacaggcactgcttcacatatgaaattgctgtgcaaatacacacggctgaaaaatacgagaggtcaatggacagcattagcatgtccacttcatgaaaaaatgacacacttctccgtgttggtttagtggatactggatccagtccaacgtgaatggctcactttcagaaatgaatctgaaactgctgaccatcttctttggagtcacatgctaggaggtagcctgggaagaggcctgactctgaaatgtctcacacacactgtaaccactcactatttttgcaagaacttgcttttctttctagatataaacataagtacgctttgctcactgatggagtgtaattcttgaaagaagggagacgggagaggtggtagcccagggaagaaaggactgagggagagcagatagcagcagatgacctgagaggggaccagatatatgccagaaggaagaacttcaaagccaacacacaaaatacaggcaaaagaaattaacaggcacatcacagaagacatcccaacagtcaaaaagttcttaagaagatggtccagctcactggcaatatcctacacacatgtttctgaaaattccaaaatgtcttcagacagaagaaccttcaaacccaaatatggatccctaagatcattttccaacccaactacattaacacaagtaaaactccagagagccacatgatgctgcctgtgaacttaaatgacaaattctaacgttaacatttatttcgctggaggccaagatgacgtaataacaaaagtgttatgtagcttataaatggcctacttgtaatttgttagcacaattttggaagtgctttccaaggagcaagaaaaacttcaaaacataaacaaactaatcttcactatggctccatcactcataataaaggttaaggatgtaccttaaatagctcacaaacaggaaaagcatgtgtggatttctttgagaagcttgtaacatcttgtaactttacttatcctagtagaagctttattgctaatttttacataatcatagaactacatgaaatagccatattgcctaacatttatacttggctttaaaaaaattactattcctaaatacaaaaataacctatcattagaaaaggtaggtgaatatttaaaaaaatttttttaaaataataattcagtctacctttagtgttgaagtactgccttcataactattgatggggactccaaaaatatcctctatggaaaaatattcaggtatctaaaaaaggattcatctgaagaaattttatagtaatggtttcctttgaaatatttttggacctcttatagtgaaatcatgagccacaaaaataataaatgtctcccatattttaaaactaagtagtgacatatcgtcattataaagattataaagtaatcttcctatatgatgagactaaattacaattttgcttttattttatttcaattaattaatttttttgagatggagttttttgctcttgttgcccaggctggagtgcaatggcgtgatcttggctcacttcaacctccgcctcccaggttcaagagattctgccgcctcagcctcccgaatagctgggattacaggcgcccaccaccacgcctggctaatttttatatttttagtagagatggggtttcaccatgttggccaggctggtcttgaactcttgacctcaggtgatctgcctgccttggcctcccaaagtgctgggattacaggtgtgagccacagcaccaggccacaatattgcttttagattaaatttgtaatcttcagtggaagaaaaatccatgaggatttttgttttttcaaagaggggtgggacaacaatataaagatgaaactgtttggggtgggtattttatagtatataaattatacctcaattaaaaaattaaaatgaccttaaattttaaaacgacagggacttaggcgtgaaaaaaccttttggaagcatttagttcttttccatcttacagccataaattaaaggtatttcttaatttgctaaaaatatttcaaccgaattggcttatatttaagttttaatgggtcaaatatgttaaccaaggatattcttttggcttttcggggaatttgtctgtcttcaaacaaaacaaacaaaactaaaccactgtccgaatagtagagacaatttacaatgtgtgtcaagatccagagttcatgaaatgcgataataaatagcccaaaccacgagtacattatttattattactgctctaagagtaaaatgctatggtcatgtgaggtctgtgtaaaggataggacgatggcctctgccacgtgatctagaagccacataacgcaacttttgtggaaagcaagaggattcaatctgtgtgtgaagatggcaagggctagggctgcacaacgtggtggctaagagcacgggagtcaaaatcctaggctgggaaacagtatcatcttgggcaaaacactatcatcttcaggcaggcttctcatctgtaaaatggggataatgcaacgtacgattcttgtgaactaatcttgtgaaagcagtaggcaaacgcctggcttcacaggcaactaagacgtgagctatgttcctcaactggctgggctctgttctgcagccacagggtaggcctggcatcccagaaatgcttgtcattgataacacggggacatcaagtcagagaattcgaatgtcactcctgaaagtctaatgaccctcagctgtcatccacagctcattggaaaactgctaggtaggacccactaaggctgacatatgcatacctcacaacccagcaattctactcctgggtatacactcaacaaaaatgcttacatatgttcaccaaaagaatcagatggttcataacagcatgattcataatagccccaaaccagaaacaacccaaatgcccgttaatagtagaagataaacaaattgtgggatactcacccaaagaagtattttatggcaatgagaatgaacaaactatagcaacaacacagatgacaagtcagaatgcaagaggccatggtgtatgtttccatcggtataaaatataaaaccaggcaaaactaagatagcgtcagaaatcaggacagtgttccccaaagggaggatgcagatgggaagggacctgaaggtgcctctgactgctggaacccatttcttgatctggctacatgtgagagagtttaggccgtaaaaattcaaatgctgcaccctcaggatgtgtgcacttttctggaggcatattatacttcaataaaacttctaagaaactctctggccaggcacagtggctcatccctataatcccagcacttcgggaggccaaggtgggcagatcacatgaggccaggagttcgagaccagcctggccaacaatgcaaaacctcatttctactaaaaatacaaaagaagttggctgggtgtggtgacgcacgcctgtaatgccagctacttgggaggctgaggcacgagaattgcttgaacccgggaggtggaggttgcagtaagccaagattgtgccactgcactccaccctgggcaacagagcaagactcagtctcaaaaaaacaaacaacaaccaaaaaaactatctttattattgataaaacaattcaaggccacgaatccagggtagcccacaccaccctactctgaggccctgaaaaattctgcagacctacgtcagcctaaccagcaggatgaggggccccgggccagggagcaacatcctctctcaccaatgatctctttacatttctaagcctggcatctctctgttgctttgcacatgtctgaaactgagcagttcttcctgccatgtcttatcttctagactttggtggccatctgtatggaaggaatcttcaggtaaaagacacgccacaggatactaagctgaaatgggacccaacttcttttaattaaacacatcttgcctcaggcaagttatttaaaagaaatatctgttaagatactagaaagaatggtggctcacatctgcaatcctaacactttggaaggccaatgtaggaggatagcttgagtccaggagttcaagaccagcctgggaaacatggcaagaccctgtctccacaaaaaataaaaaattagccaggtgtggtggcatgtccctgtagtcccagctacttgggaggctgaggtagggcgatcacatgagcccaggaagtcgagactccagtgagccatgatcgtgccacagcactctagcctgggcgacagagagagaccctgtcctccccgcccaccccacccccgaaaaaagaaacaaagaaagaaaaagaagtatctgttgagatattaaagatacatcttttaagaaactacaaaagaataatttgtacaaaatttaaatgaacactagtaatgtacagaattttctaattaggcatacatcatatcctactaatcttagtgaattcaaagttactagtgtgcgcaaagttattttaaaatataaagcatgctggaaaacaaaagtttctgaaattctgtacattcacttctaaaatgtcaaactaggctgagtgcagtggctcatgcctgtaatcccaacacttaaggaggtcgagaggtaggaggcctgcttcaagcccaggagttcaagaccagcctgggcaacaaagagagaccccgtcactatgaaatattctaaaaaattacctgggtttggtggcatgcacttgtagtaccagctgttgggaaggctgaggcaggaggatcactagagcccaggagattgaggctgcagtgagccatgatcataccactgcactctagcctgtgtgacagagcaagacactgtctctgaaagataaaatgtcaaaatgactacttatttggatcactatgcatgagaaatagtttcttctcaaagtaaacacatgctcatatgagaatatttcagtcaataatgctccctctctccggtgcagcacagggaatgtttagggcacagaaactataaaatagtgtaaaggtggatacgtatcactatacatttggcaacacccatagaactccgcagcacgaggaatgagccatcgtggaactgatggacttcaacaacaatttatgaatagaagctcgtcaattgtaataaatgtaccacactaatgaaagatgttaataatagggggaaacggagggggattcggcgggcgagacagaaggacagggagggagtatatgggaactctatactctgttcaatttttctgttaaccttaaactgctctaagaagtgaagtctattgattaaaatataaataaataaataaataatgcttcctcccgccttctaagatgcccacattttacctttgatcatttctgcaggaaacacctagtttagaatacacaggccacaggaaagaacaaaagctttcactattttcagggttttgtgcttgtatgtgtgaacatctttgtcactcacggtcagtgatttatacagacatgatcttaacaattcagtatggagaacgactatcttttttttttttttgtacttggctggatactgtcctgtgtaagaaaatatattggaaaatgtattcaaataaaagcaagaataagggtcgactttaataccgtggggagaaatccgatcgattgggtccataaggaaagatgtatgcattcggtgctccctaattacaactgctttggtgggcagcagcagtggtgaaacagatgttggagacctattaaagacggggtttcaaacatctgcttacaattttaaggcaattgtaaatacagcagagaaggtcaattgggccaattaaggccgatgtgcaaatccaccactgcaggtttcttttcaagcttacatggacttgattttttatgctttcattttctacaaccacaatttttttttaaacccaggaaatgggtttaataacttttgtccatttttgattgttattcttcttaaatggaagaaaactttctgttcaaagaagtcactgcacaccttttgcctcacgatgactcattttccttccctcccctcccatgctcacagccggccactcggccccgatcaaagcgggttccatattaccagggaggtgaggaatcccgaatactgggcttcctttctaagccataatgaacatgggcaagtgtcaccttcagaaacttccgtgccgcggcacacaacagtgctcccagctgtacggatgggactgctgggagcatttgctgcttctaccctaggcaccttcaccagcctttattagaaaatcatgagtttcatgaaccgtaaatacaacggcaaactgcactatccctcttctaagtaggtaaaactgaaattctcatggtatgcaaggctcattcatgtcagaggcagtagcagggacacgctcccagttaattccaggccagtgctacaaagtctaaggcccacttgctgctcaaaaattggcccccagtggtggagcgggacttagagactgagggtcggcaaagaggcagagcagtccagctcaacattactaggtcatttctcttaaagctgcacgtgtaatcgttacttgtgctaagtaggtaaaaaaaagtccaagtatcacaggcatcaaaatggcctcctctgggagagtaagaaataagcctggcctatcttccttcctatgagctctgtgatggccaccggagtatattatgccacctcttcttggtggcccagaccactcaactgctctctttatatagagaaaaaaaccaaggttgggcaaacctagattcaaattctgcacttcttagctgagtgacctcgaagcctctgtttcctcatctataaaatgggaatattgccatttctagagctctaaaagttgatacaaagtaggtactcaataaatgttgagttcctaaaggtgatacacagtaggtactccataaatgttggtttcctaaaagtgatacatagtagacactccataaatttagtttcctaaagttgatgtgtggtgggcactcagtaaatgttggctttgtaaagttggtacatagtaggcacataataaatgttgcttcctaaagttgatacctagcggcagtcaataaatgttggtttcctaaagaaaatacacagtaggcactcaataaatgttggtttcctaaagttcctatacattaggcactcaataaatgtcgaggtcctctgtcctcctgagacctttgggacctccaccaagacatttccaaggggcctagactggtgtttccaaccaggcagggcagttcccctgaatgtttctatttgtttattttcggggggaggtatatccagtttttgtgctgttgttgatattgttgttgttattatttgctttgtttttggcgaaacaaagagtggataatgaaactacaaaaaaattctaaaagaagaatccttgaggcagcagaatgggaagaaatagttttcagaacaaagaaaattctgaaggaaagtcaatataccgcacagaaatctaggttgagaaagaactgtttttcccttacatctcctttttacttttcaaccttgaggctcagctcactcaggtctgagcaagaataaagagtcctgcttgtctaaacaactgctaaatctgaaggcaaacagctcaactccatgtggttcttcagcaacattcctgtcaacaaaccccgtcttggctcgattggtccaacaataccagatttagagccatccgctcatccttcttccaggatgcaaggggattttcaaaaggccattccaggaacagctctcacaatttttgtagccttttcaaaaacacaaaaaatctaattcatttgctgcactgcttcagccatccagcttaaactaattttaaaatctctccttttgtaaatagagatgttagaaacgccaccacagccacaatataaaatgatggtatctttctcttttgtaatcaaattaccatcatttattataaagcttcagacagaaacctgagagatgggcaagacgacctggcgttcagaagagagagatggcatttttgacattgaaataaaggcttggagggcataaatccttttttaaaaatcaagtatttagcacaggatttggtataaacactgatcaataaataagagccagcagtcatagcagcacgctagaatcaacatcatctgagttctagcacagactcgtttctatgaatcattgaaaaggaatttcatggtgccagcagcatcagtacagaaagtcagaataagcacttagacagtaataccagcaacttatttactatcctacgttagagtcagtttgctggattttatataaggtaagtaatggatatctaaggtactgtcaattaaaaaaagttctccaaagtaatttttatttaaagttgcatatgataaactgtaaaaccaaaataacatttgggtcaaaactccaaagagttgggctatcactaagctagaaagagaaaaacagcagaaagaggattttcttgctgatatgccaaaaacgtgactctatttctttcaacagggtttattgttttcttcctgttttacaacagcaatacatataagaattttttttaattcagaaaattgcagagataaggggaaatttctcccctaattctattccccaaagagaactgcctttcatgtattctggcaaaattctctcatcttctttcaatgcatgcagaaaccttttgtttatttacttttcgaaaacaaaattgggtcatacaataggtattgttttctgatctgcttttctaatttttaaatgctgtgcaacagttaatcaaacggatatacaattaacctcccattattaaacaccaagaacagcttctatttttctgtattataaatggcaaagcgacgaacatccacatatataaaactttgcatcacttcatctacttgggttaaattcctacaaactgaattgttgggtcaaaatacacgcacattttaaggtatgtgatatacaagacatgccagaaaaattgtgttaattctgcacaatgtatgagagtactcttttctccataactttgcccacataattgttgttttttttttttttttgaaacagagtctagctctgtcacccaggctgaagtgcagtggcataatctcggctcactgcaacctctgcctcccgagttcaagcaattctcctgcctcagcctccggagtagctgggattacaggcacgccccaccacgcccagctaatttttgtattttagtagagaggggattttaccatgttggccaggctgatcttgaactcttgacctcaaacgatctgcctgcctcagcctccaaagtgctgggattacaggcttgagccaccgcgcccagcctcaactgtaaagctttttgtatactgaaaatattaaacttttatgattatattccaactatttttcctccattagtaacctgtttcatagtgctgcttaatgcagagaattttattattgtagaccaatcaatctgcctttttcttttatcattttcccttggatttataagcttagaaaggcctttcctatcctaagagcaaatacaaaatctgctttacatattgaactaatattgggatggtactgatttttattgcaatatttgagaaggcaaaacagagtttaaggaaagaaaaaagaaatcccaaaggatggggaaagaggtgagaaggcttctaaaaataacatttggcagacaccggctcaatgcaagtctaatttgcttcttagttaatgaaggagaaaatggagatggcgaagaaataaaaggtccattctagaatggcaataataaaatcccctgtgaagacaataacaacattcttgttatacatggaaatctaatcctaaaataataacgcatatattgatataacagcactgtgaataaattccatttaagctatgttattttaacaatgacccagaaaatgttaaactaaagaagtttgttacatgcctagtttggcccacttagagagccacaggttctcagaaacatatctggaaaaggcctttttgtctgcaatcaatgcatccatcatggtgcaccaactggctgactacaaagagcttacacataaatatatgtgcatatacatatagattttacttgcatcaaaaggtaaaaatagaatttggtttattttgtaaagccattcaacgtaatcataatctcattaggatccagcagaaaagaatgactctggcagctttttgctgggaccctggtacctccttctgcgggtagaaaaggagcccctgggggcatctgggtggaaggaaggctcggaggctggagacttgcttgcctggatgccagccagtgtggcaaagatgtccagggcagcctagagtttctgctgggggcaggggtaggggtggtcagggcacagccaagtaccgggcagtatccaccccagcccccactgaactgccagcatccggctctgcctgtctttggcttctggcttgctttcctagcctgattctctgaccttcccctcggcattgagagctctccaacattcatccttccagtgcatttcttttctgcttaagtggcccaggtcaatttctgttgtttgcaatcatgaaccttgactggacaaactcttattagcttccggcagatattaaaagatgcatgagctcactttgatgcaaaagggcctcagcatggatgcacgccttatctatgagaaagctcctctgcttcctctcctggcctccttgtacttatctcatggtttatacttgattttgttcctttcaactttcttcttttcatgcccaactcccctccctaaaatgggtctggtggcagaggtgaaggcagagagcagaggtgagaagaaaataggaaagtgagtaacttttggatattacttttcagaaaacattctgtgtggcagtggccactttcctgtcaaaggcttaacatttttttcctataaatacattaaaagtgagtcagacttggatttgcaccttaacattattgccaacactttaaataactatatgttctctacaaatgttctctactaaagaagggactcggagaatggagggagcaaaaaggagaatggggaggcaactccggggcagctcacctgtctggccctgtgtggggtttcctctttagaattcagcaggctgtagggaaggtgaacactgggtactaggtaacccctgacctggtcagggagtctgagaaaatcggagagactgctctctatcctgcacccccaagccccaagctccacaggcttgcagggttgtcttgggaagcccctcccagaggccagccccaattcagcagggtgacggggcatggaccacacacgcatgcctgtccttagcgccttgagtccggagacccctgttcctcccagttcccttccttgtggaatggcgaagggagaggtgtccccagggagggttttggaccgtagccacctcttaagattctggggtcgggggacaagtcctgagtccaagggaatagcagggtgacactggtcaacaggtatgtgagtcctggttgaattcttgccctcaaatgttcatgctacattttctgtgtcccttccaccctcaatctacagcgaggagctcccctatcctgggccagtcggggtctacaagccagccagggaagcaaagggagagagggagaggccttcgaggacactacccctgctggaggggtgaggcgaggatatgccattgttgaggggctgtagcctacggccacaggtgatgggcagggtgggttaggaactgtgtactccaaaactggttgtggtttctctcagcaaaagctttttgtacctcccctccctccatggaaaaacaaaaaggttatgagagagaaagatattaggttaagagccttctacatttcaatagagctaccatacaatccagcaatcccaatcctaggcatatacccaaaagaatggaaaccaggatactgaagagctatctgcactcccatgtttattgcagcctattcacagtagccaagacctgggagcaacctaagcgtccatcaacagatgactggacaaagaaaacgtgctgcagatacacaatggagcactatccagccacaaaaaagaatgcgatattgtcatttgcaacaacatggacggaactggaggtcattatgctcagtgaaataagccagacatcgaaagacaaacattgtatgtccttatttatgtgtgggagctaaaaattaaaacactgaactcatgttgatggatggtcatcagaggctgggaagggtagtggggggcagggaggtaggtggggatggttaatggggacaaaatagtagttagaaagaatggaaaaaacctaatatttgctagcacaacagggtgactacagtaaaaaatattttaattgtacatttttaaataactaaaagaatataattggattgtttgtaacacaaaggataaatgcttgaggtgatggacaccccatttaccctgaggtgattattacacattgcatgtctgtatcaaaatatcccatataccccataaaatatacacatactgtgtacccacaaaaataaaaaataaaaattttaaaaagcttaagagtcctccacatttcagaaacatatatttttaaacattaggaaaaaggtagaaaaacagtagtctatggccgtaagagcccgcaggcaccctgcttgtccgatcacggacgctaagcggggttgggcctggctagtacttgcatgggagaccatgtaggaatgccgggtgctctaggcttaaatttaagtaagtctaagtaatttaaagagatttttttaagacgacagattataagtcaaagtgccaccctgtggcacccatgactgttcctgctgcagagatgctctgaggatgccattcgttctcacatggaattctttcatgaagatcccaaagaaattcctgtctggtctcaccttccagaatacatctacttttttctaagcgtctctctaagtttaatctgtgacttgttgacttctttacatcagctgttagtaaatctaaagacaaattcctaactgatgagataagctggattacctgaacattaccatggagcccctctgggttatctaacacgggaagaccagaggctttctctcctggcagagaggaccatacccagcttcccaggggccctcaagtccatgcacagggcagctggatttcccagacaattctggtcagcagccaacaaacaccccaggtcctgctgcttggtgccaggccagctgctgccccactgacaaggggctctcacaattcctatgccaaatgaaagcagtaaggaaacagagttctttctccaaaacacattcacacttcatggccagcacagagcccagcacacctctcagaggggtaccagaaggatcagaggaccagatccttggtacatctgcctctaaagcctgatcgttaagccatattctaagaccttgaggaccccaccccaagtcctagtgcacaataggtacctcctgcaaagatgcaacctgcctgaaaccatccctcagacacaggaccccgctgaggacatcacttcctcatccctgccagtgcacatctctggtgcagcttctccttttgcccctcccaattttaattcaggacctgacagatttataaattgcctccagtaatttctggaacacagcagcacagaagaaggagaaggagggaaaccaaaagaaaaaacacaaattctctatctttcaatgcaagtataactttttgccatgggttttggcttcctatgactcagtgcacactatcacctcgagattctcatgatgaataggattgaaaatgtcctaaaatagagccaccttcaaactgcagtaaaacaccttcccaagagggcacacaggtacaaatggtcttaagggcaaaaaaatccacagagcctcactctcccatatgtgctttcctaaaacacgttatttcggagcgagcttggagttcaggcacacaaagctctatctttaaacctctccttaaacaactgcctttctcccatgtgacaaagaaagggagagcactcaccctccctgggtgtaactatggaaggaagtatcctggaagcgtaaaaacctccatggggcaacagacaggtcatacaaaattctgatgacagcaaaaaatgtgcagatcaaggtttttataacagtatgtttaaaacatgggataaaatacaagtttttttaagtatgttattgtattgatgaggtagtattaaaattaaccatttcaattttctcaaatagttttaagtacagcagattaaactaaatgtctttaactaaagcactaacaggtataatgataacaatttggtaagtcacagtaaagtctcttaactatccttcagatattaataaagtgaataactctaataaccagtaacagattctttcacaaatcaggtgggttccagttctttgctttcaacaaaactgaaggaggacctaactgagttattaagtcaataaaaataattactgatgagagtgcaatataatttttggcatataacttgtaaacatttcaaaaaaactgagtggcaatgctgtttttaaaaattaattccatccaaatggaattaacatttgtttttgttgtagaaaagcatcctggagtgattaataaaagacttttcaagcataaaaatgggttatattagtatattgttctatggggaagaatggaaatatgagttcaaaaatataaaataacgatgtgaaattttgactattaaaaaagagtctcatataacttttaatggataatggcaggcatcaaataggtatggcatttaaattcattggataaattttagaaagacatgagactctttgaacgtcaatatttgtcatatgttaaaaatcacatcctacaattaagcttttgatgagaactgttagatgtcagcttaaacacgtgtaaggggatttacagattttcaaaattattttaggggtacacaactaagaacactgaacaatcactgctataatggcaccctattactctaccacaggaacaaaagctcccggggttcccaccagagacaggcacatctggggcacggggaaggacgcttagagtgatgctcatttaaaaagctcattttaacagggaacagtaagacaagcatcaaaaggaagtgcagactgtacagatccttggagctctgcagggggagtgacttcttaggcgctggttttcctcctgtttatgagagtaggactaataatttgagcagttcaaggtggggaaaagcttaagtactgagtgcactgaggaagcagaggtcacaggaaggaccccatagcgaggtcctctgtgggtgcaggactgccccctaggggacatttcagaactctatttttctggttgtcataatgaccagaacgtagtgctcagaggggccaaggattcacgatgtcttgcaacacacaaggtcagccctggacaacaagattctcccactattaaaacaaatttttaatattccactggacacacatttagatgaaatacttgttcacaatgatctgacttgagaatctgattctatttttgcgggtacacagcaagtactttctgtacagcggtattaaactctaaatattccaaagataggaccaccatgtaaatcaagggggagttgggtaaagtccatacaagcacaatctgtttcgcactctgagaccagatcatctcaggctacactattcatagtgtccaggctgcccaagaccttgcagccatcatattcatgttttttttttgtataggtgcatgtgtctatttcatcacatcttcttaacagtcagatatgagcacatattccgatgcatattattttctttaactttttatttctatattggtttttagaattatctgtatagatcgtttatataatgtataaatccaacttcaagaagttggccacgcatggtggctcacgcctgtaatcccagcactttgggaggccaaagcgggtggattgcctgaggtcaggagttcgagaccagtcttgtcaacatggtgaaaccctgtgtctactaaaaataaaaaaaaaaaaaattagctgggcctgatgatgtgtgcctgtaatcccagctactcgggaagctgaggcaggggaactgcttgaaccagggagatggaggttgcagtgagccgagatcacaccactgcactccagcctgggcaacagagcaagactccatctaaaaaaaaaaaaaaaaaaaaaaaaaaggttaaaggtggcagtacaaaatgtttgtttgtttgtagacaggatctcgctctattgtccaggctggaaatggcacaatcatggctaactgcaacctctgcctcccaggctcaggcgatactcccatctcagtctcccaagtagctgggaccacaggtgcacgccaccacacctggctaatttttgtatttttttgtagagatggggtttttctgtgtttcccaggctggtctcaaactcttgagctcaagtgatctgccctccttggcttcccaaagtgctgggattacaggtgtaagctcacacacctggcccaaaatatttgttataaaaagagatatggacatgctacaacatgggtgaatcttgaaaatattatgctagatcaaagaagccagaggtgaaaggccgcatgttatatgattccatagctatgaaatgtccagaacaggcaaatccatagaaacagaaagtagatggtgacacccagggctggtgggtggggggcagggggaaggggagtgactgctaatgggtacagggtttctttttggggtgattttaaaaagttctaaatttgagtgtggtgatgaccatacaagtgagaatataattttaaaaaccaccgaattaattgtatgctttaagtggttgaattgtatgggatgtggtttatatttcaaaaagcttttttaaagtattggtcaaatttggttgaaaagcgctactccagacttgctcacatggaagagaactggaggggaaaaaggtaggccagaacatctaggtgggacccctacagggttaaaacagctatgaagtatcagaacacttctgctatttagactgcggaaggctttcattttaaaggacatacaaatggcaatgaacataggtgagactttccaaaatagaatctatctcagattgcaaataaataccacggcttctatgggtcgaaaagacataaataacacacaccaccgccaatagtagtcctttgaaaccctccagacccaattaacacactaagaaagcataaaaacataaactgttctaggaagtatatcatcaggtaaggtaacacagtccccccagcaacaaaaagaaaaatagaaggaaggaaaaaaaaatgaatgtccaaatagcacccaccaccaataatcacctagttaagagaaaaccacatctagggatcaagttccctcacctcaagttatgaggcgggtatgagccagtgcatgaaacagctaatgtattctgaaatcagaaaaccagagcaaaggaactaagatttactagcacgtaaaaccacacacacacacagacatacatacaaggtaatttctccaggcagcatcttactttgattaccttaaattagtaatttgctaatgcaggcagttctcactttgcatggtcccacattaactgaaagtcacgcatgtccattgcaaacagtgtaaagtgaggacactgttctgatatgcacaaatttcagtttacatggcgccatgcaaagcaataaatgcctctaccaaaataggtcaaacaacatgtttaaaagtcttctctaatatggaggtctgtttgaaaacccgtatcaggattgcttatctcttgttcaacattgccgtttcaaaacccaagccacaccaggtattcattccagttccaggtcagttgcttcagcgatattcccaaaggagaacatgaacaaaccctcaagatcctttcttcttccctttctttaacctttctgtttgttcgatccgattccaaagctgtaggtggaatggcagaaggcaggagtggggtaggagagatacagagaacctccgtctccttgctagactctcctcactagtcctattccgaagaggttcacaagaattcatgctgtttggtctttcatttgtgtactactggaggaagtccagctaggttaccaatgataccagcagtcttagcaaggcttggtaagaagatgagctgtcatgccaatgtcctcacatcgatcctcctttgttcacccaccccaaacctccagggccctcgctggggctcctgctcagagctcccactcctaggatggcatttcagtggcccaagttctggtggcttcatccaagctcccctcaacaaagcagagtgatcctgttttccccataaaagcccagtttttagctggccatcatttaatttaggatcttggttttttgttttttgttgttgttgttttttgagatggagtctcactctgttacccaggctgaagtgcagtggtgcaatctcggctcaatgcaacctctccctcccaggttcaagtgattctcctgcctcagcctcccgagtagctgggactacagacgtgaggcaccacacccggctaatttttgtatttttaatagagacaaggtttcaccatattggccaggctggtcttgaactcctgacctaatgatccacccgcctcaacctcccaaagtgctgggattacaggtgtgagccactgcgcctggccaggatcttgtttattttttattatattttaaacattttcattagatatttaaagtcatcaagattttataaaaaatttctttcactgcccttaaacttaagaaatcttatctcatcaagagcatgactaaatatccactttatcctctcctcctcattcatattttaatatttaattcactcatttatctggagtcctttttgatacatctctaaaagacagataattccacaatgagttgctagctaaacattacttgaaatttcaggatgggactctgtcctcaccaccaagctttgtttccaagagatgccatgactgataaaactgaggttggaaagatcaatgtcttacagaaaacagaagattggggggaaacgattgaaacagcactgaatatgtttatgaaatgcatccactcactcaacaaatatttaccgtgcctctgtgtcatccaagttccagggatacagcagtgagcaaagttcctgactttgtaaggtttaagtgatagagacagagacagatgttaaataacgcagtacatcaagggctgaggaggccttgaagaatagtggatggagggtgcctgcagtgaggtggtggctgctgttgtcaggctgggagggagcccgccctgccatgaggacctctgggcatctgcaggagacagggagcaggccatgcagctgtgcggggcaagtgccttccaggtgaagaggaagcccatgcacaacgcaccagaggctaaatgacccaaatttgcagagtgagccagttcccaaatgctcctcgtgcatcatcccctccccaggcttgggacatctacaacaggctgggaaccactggggcaggacttcctaccaggtttgtcatctacaggctacacctcttctgaggcccctaagtcacccaatgtttggcttggagttttttgttttttgttttgttttgagatggagtctcactctgtcgcccaggctggattgcagtggtgagatcctggctcactgtaacctccacctcccgagttcaagcgattctcctgcctcagcctcctgagtagctgggattacaggcgtgtgccaccaagcccagctaattgttgtatttttagtagagacggggtttcaccatgttggtcaggctggtctcaaactcctgacctcgtgatctgccccgcttggcctcccaaagtgctgggattacaggcgtgagccaccatgcctggccagcttggagttttttgtcttttgtcctggcattcttcctttcctgacttggttctcctagaacctccctggcttctcacaaatggtttctaagctgaagaatccattgttctgagtctgaccttgcaccctcagctctccccactctgcaaactccactgggacccccacagggtccacaagaggagaggggagcaggacaactgtagtcttgttcttttgcgtaagtggactgagttttgcagaggtaggaagatggaagattttcatcttttagtttcaaaagtctgtctcaaacccacagctggagtggccttgctgcacagagcagtgactttcatacaagttgtcttgtggttaaagggcatccaactccaaacccaggagtatccctcaaccttttgaatttcgtttaaaataaaactgtaggatttcaacaaggaatagaagtggtcccaaggtgggcttcacaaaccaccattcccagacatgtttgtggggaagccttcagcagcaatgctgctcaggtgggcattcaggcacagtgacaaggagatggggaagaagacggtttcgcaataatcaattacaccactggaggctcctggctgcctaagggcacactggccctgaccccatcctgaaattgttccttgcaggtcgcatatttactcaatcaatattcatgcagagtccactctacagcaggctctaggtcagaattagctggatgagaatgctcgggttccctgcatgtgtgcacacacgaaccctatatatagtacattttgcagtgggaggggttacttttaattgagcacctgctttggtgtgtctaatatagtgtttgatttcaaccttattctgagtaggcattactattcctttttttcaaatgaggaaactaagcagagacagatcacataacctcccccaaggtcagccagctagttagtggcggggcgggactcaagccagggtgatcagactccaaagccatgccccctccaggaagtcacacccctccaggaagccacacccctccaggaagccacacccgccaggaagtcaggctaattccccaaactagccactaaaagtggccaggactggtcagatcaacatgcagagaaagctgctgatgttttattgttaataaggtcccaagttcaagttttatttggagatgttcaaattttaattattacttttaattgaaatgcactgtaatttaatattaatttttgtgtaagtcaaatgaattaggctaaattgcaactttcattttattttggaaggaggagaggctgaagaaaaaaagcaataaataaaaaggaaaaattatttctcttagaaattcacctgatagagagggattactgcattttctaaaccatgtctagtttagacacggcacatctggtatgatagatgctgtgtatgaatggaaacaagtttagggtaataaatgtttcccagtgttaaaataaacgcctcagcggttcagattttggccaggcagtttctccacagtaggaggcacttatctactttaacactttgctacttagaaattatcactcaatcaattaccgtccacctgggtttatttttacagagagcttcaataaaatgagtgtgaaaataagttaaacacattctattcattttctcaatttttcacctctcccaatggtggttatgttgacagaaaaattacttcattttatttcaacagacatttatggaatgctgaccaggttctgtgctaagggctgggagacaggatatgaccaagtggaatgaaatgtggtccctctcattacagagcatatataacctaccttttagcacaggcggtgtctctacagcccaaatgaaggcaaccacgagaaaaattctggaccctacaatctccacagccctccccttcctcccctaccacaagagactgccctttgcccaggtaacgtccctgtggtgtttacctatgtggtccgtcaagctctcaggtgcttccagatatggaaatactctttcaccaaaagatgtttgttatactttcttttttctttttaaacttttcttttaggttcaggggtacatgtgcaggtttgtttaatataggcaaactcgtgtcagaggtttggtgtacagaccatcttgtcacccaggtactaagcctagtacccaatagattttttcctgatcctctccctcctttcaccctctaccctccagtaggccacagggcccattgttcccctctttgtgctcattggttctcattatttagctcccacttgtaagtgagaacacacagtatttggttttctgttactgtgttcgtttgcttatactttcttttaaaagagtacctccctcttacatcacttctgacgtaagctttagaatttctgtaccatctgtctttttaaaaataatagctttactgagacataattcaaataccataaatccaccctttcaaagtataagactcaacggtcttgatactttcacaaagttgtataaccatttccactatctaattccagattcatcacccccaaaagaaatccctcacacattagcagccactccccattcctctctcctccacccccctcaaccaatctcctggcaaccactgatctattatacttactatccccatggatttgcctatcctaggcatttcctataaatgaaatcacacaacatgtggtcttcttctgtgtctgacttctttcattttagcataatgttttcaaggttcatccatggtacagcatgcatcagtactgcattcctttttatggctcaataatattccatcatatgactagacattttatttatccattcatccactgatggacatttgggttgttcccaccttttggctatcatgaagcgtgatgccatgaatatccacatgcaagtttttgtgtggacctctgttttcatctctcttgggtaggtgtctaggagcagagttgctgtatcacatggttaactctgtatttaaccttgcaaggcgctgcctgttttccaaagcagctgccccattttacattcccatcaacagtgtggaagagttccagtgtctccacatccttgcgaatacttgttactgccttttttctgacagccccaggtgtgaggtggtatctcattgtggttttgattggcatctccctgatggctactgatgttgggcatcttttcatgtgcttaataataaatctattttcctttacaaaattttcttaggttttttgggtattctttcgaatttcacattttgacctacaagttcagaacctctccgcatccgttcctctcaccctcctgtaatgtggtgtggtcgcctgtctttcagctcctacagtcggggcctgggccaccatcgctgctctcgcatggctgatgagccttatagagcctacatcacatctcttggacctggaaggggaaggaagaggaaaggcctggagactcaccaaaaggaaggaattcagcaatggcagaagtgagccccgaagtcccaaagtctctggattattctttccaccaagccatgttacgcccctaattcaacacttgtcatttctctttctctctttttttttttttttttaaagcgacggggtctcattatgttgctcaggcctcaagcgatcctcccacttcagcttcccgaatagctgggactacatcgcgccactgagcctggcttcaccatttcttaattgctacaaattccccaaatcccatgagacagaaatgtatgttcagtcataaatatgagtgcacattattctcccaggcatgacatggaacaagtaaaacagtaatcctgctttctgggtgcagagtcagtgaagaaacataaaaacagtcgcatagaatgatgcacagagatttagaaatagcaccataaaagctctaaacagggagattccacctggagacatcagcaaggcttgcagaggagagagaactgaccatcgccgatccactgagaaggaatcagatggaaaatgtgggggtggggaataatcagggatgggaacagcacattcaaagatccagtttcaggaaatagcaggtgtttagtgaaactaaaacagaaagcatgagggtcacaggcggggtcacagaaagggtcaaggctggaaagagaggctggggccagtgcttgtcagtcttccctgccatgctcagggttgggattttgtaggttctgaaatgcaaagcctgtgagtttttgagaaaggaaggaacgtgattagatttgcacttaaagacctcactgcagcaaccacatctctggatatcatacagatagatcttttcagcatagtaatgaaaactgaaaattactgcaaaatgcctaaacttgttcaagattctctttgtatcatttcttcttggcaaagttccgctgctcaagacccaacaattcatctcaaccactcaccacaaggttaagaaatgctctgatgctgtggtgttggaactcagctatgttgccacaaagtagtgggcttcaaacctttggcttaaatgtcccctagtagaattacaaaaaaaactatgaaagccctgcatatttttaagttcacataaaagttttccgtctaagctaggacagttgcaaaggatgcaatttctggtttgggatcaatattgacatttaaatgaaactattatatcactcttgtaagtgtgttcaaaggaatcaaattatcataaaaatgtgttatccaccatcatctaaagtgcatgaacaggctgggtttcgtggctcatgcctgtaattccagcactttgggaggctgaggcgggcggatcacttgaggtcaggagtttgagaccagcctggccaacatggtgaaaccttgtctctactaaaaatacaaaaattagctgggcatggtggcgtgtgcctgtaattccagctacttgggaggctgaggcaggagaatcacttgaacctgggagatggaggctgcagtgagccgaggttgtgccactgcactccagcctgggcaacaaagactacgtctcaaaaaaaaaaaaaagtacatgaacaaacatttcctttagtcaaaaatttgcattccctttcctccttcaagaaaattctacttcaccccaattccatcctaatcctgcttaaaagtcttacttctctgttttatctacaataaaaatacacatcaaaaaattgtagtttttatttcctgtaaccattaagctctaagtgttaagttttcatattatgaattgattcagttacaattaccaatagtacagaatggatcaaaatataaatgttttaaattttaataaaagtattatgtataacttgaaatccattggaaatccatcttttaaaaagatgaatgggcctttttatcctttctatagatgaatattacttatggctagaataagacaaggttaacatcaattctatttctactttccattttttatagatgttaacactgagaaaccttgtccatatacctaagtacagggaaataaaggagttttattatagcaatgctgctcaattctttaaactgcttccaacatatttgtcaaaaatcatgccttatctatcattaaaaagtgttttttaaaatcttgtcttttgctttctgacaccaatatttcatgttgccctgtctgccaccctagaggctgctccgtctcagacaggctccatccatagcaagattatggatgggtgagaaaagtcagttgtggggcggggcagggtggggtgcgtggcagtgggtgggagaagaaaacaggctgatacccccaccactgacatctgctcgggcggatcaatctcaggcaagagtccacgtggaggctaagggtctgaaaactccaccactccccacttatgtgccccagaatgcgcgccagtttaaaggaatggctctgaggcaggtttgtagactcctgggtctcctactccggttaaaccttgaaacagaagctctgttcctggggaccccgagaaaggagatgcaagcaggaaagaagcaaagatggaaaaagatgaaaaatgttagaaaatggcataaaaacaaacaataaagtgtttttcagaaaaacagagaaaagctctataaattagaactctgtggcttgccccacacaaagccatcagattagggagcagaccctcttcggctttctcctccccagctcctgcctctcctaaacatacccagagaacctcttcagtctttgtaccgttttgttattgttatttttaagcagagggtcatcatttcaaccctggttgttccaaacgaatagtaaactgtgatagaaaattctgaacattccaccaccagtgacccttactattctgatatggtctaataactcagaattattccctatcatacatactttatataacatcagctaccacacaagtttttaatacacagtaagcaggtggccccagcaatttctcttatatctcacatctggtattgtactccatataaggtgctgagtccgattttttaataaaaacatggcctgagcttgtaaaagctcaagtaaaatatgcctttaaaactgctgtatttaatttccagtcatgaaagtctaaaattattgtaaaataatactcaacttttttcacagatccattcaatgaagcttaaaagtactttcctttcagaaaggtaaagagcttcataactaacagtttcttgaattcacatgtgctgtcttacttttgtgagcgtgaattgtatacattttatacctttcaatctggaccaaattagttggttagtagcaccaaagtaatatacatgtatgtttcggggcagaggtgggggaagggaatggtaagggaagggcagaaatgctggaaattaaaccaataacttgagacttggaggaattcattattttttcaaaaaggaaattgaagacataaactgaagatacacactaggtaggaaacatcaacaaatgtgacatgattatgaatattatcttataattagggaaatagccattttgacggtcattacactttatgtgaggttagtgtacaatgtggcgtaaaagactggtgtaaaaatgagatggatttctgcaagttcaaacttaaaatcgtgcatctgactagatataagctgttgcgagtgcattacatctcccactccagtctaggaaaggtggagtccctttcatttacacgactattttcatgactgggcaaattcacagaggaaacacagggatcacattccttcgatcataaagtcctcaaaagcaatcttgctccatgtcagctggtgctaaatcaaaaggtaactttcatttcctttaaataattcagtttcatctctaactatcatcttcaaccacagattttaaattgatgctaaattgggtaactaagtagaaataaattagtagtagatgatgctggctataaaaccaagccaagaatttgagtagtttttttttttttttttaaaggttctgctctactgaatctatccgataatatttctccaaagaacttttatgctagtgctcattttttcccttttgggggatgatggaaagggggcagttaccctcccttgttatcacaagtaaaatgcaaaaatcagcccacagatggttgcagagaaaaaggtcctctcaaaccccaaaggcccaagtgtaaactgatattaatagatctgctcagtttgtaggcagtttaacaatagctatccagactaaagacacatgcttgatgacccagttcccataaaagagaaacatcacacatgtacatatatctggggggcagagttcctcgatgggcgttgcaacattggttctcagagaaaaacaacagaaatcagctaactatccattaggaaggaaacagctagcagctaaacaaagcgtagcatgctcttattgtggtataatgtacagtagtaaaaaggaatgagatagatcaattggctacaacatagctaaacctccagagtacatggctgaattatagagtaacacagcagcaaacacagatcaaaatccaaccaaatctactttccccttcttggcaacagaattttggctgcaaagtgcatctccctgactcccctcctttcagctaggcaggctaggaccaggttcttgccaatgaagcataccactccagcctcacacgtttaagagaaaatctctacccctctatttccactcctttgtcttatctgctgtgtggaaaagcaatgaccagatgactgacctagaaagtcacatgttaaagacggcagagcccctgtcagcctgggtctctgaatgactgcatggaacactgcagcccaatgacctacatacactacttattatgttctgtcacatgagggagaactacatgcccttcttttaaagccaaattactgtcaagtctcttactatagcaacttaatcttttatcccaacatagaaacatacagtaagatgaccaggtgcggtggctcacgcctgtaatcccaatacttttggaggccaaggtgggaggatctcttacggttgggaggatctcttgaggtcaggagttcgagatcagcctggccaacatggtgaaaccccatctctactaaaaatacaaaaattagccaggtgtggtggcacacgcctgtaatcccagctacttggaggctgaggcaggagaatcgtttgaatggggaggcagaggttgtaatgagccaagatcacaccactgcattccagcctgggccacagagcaagaccccatcacgaaagaaaggaaaaaagggaagggaaaagggaggggaaaaaggaagggaaaagggaagggaagggaaaaaagagagagaaagagaaagagaaagaaagaaagaaagagagaaggaaggaaggaaggaaagaaagaaagaaagaaaaagaaaaacagtaagaccccttctatattaacaccatatcaaaaagacttgaaaaagcagatcaatctcctgacagtgattatagaggtgggaatgagagaaaggaagggcacaggcaaaacaagacagatgggattagggaaaactttagatttcacttttaaatatatgaacagaaaatatatccatgtattactcatacaattgaaagctgataatctatagaacgtaacaattttaatgaccaattctattttttcctctaagtttttcattgaggtggcatttggattctaagtgattccagtcaatatatctttccataaaatataaagaaaatgatgaccaaaataaaaatagtcataaaaaaaaaaggcgtcatgagaacattgtctggcactcacactctggaaaggggaaaaaacaattggctggcacgacgactttgtccccacggagcgttgtaccgtacaagcattcttccaccaggctaccatgtgagtgtgggcagttgtccccatctcagggtctccggaacctgggagaagtccatccaccctagtctgggagacagcacaggctccaggagacgaagtgaaggctctgtcccctgccagccatcaggtatagtacaacctccctctctccaagggacagtttcttccaatgaaaaactgaggcaccgcacaggttgtgtctgagatacgactcctcgcattcaagtctcagctggaaggccctaaggaaacaactgcaactttttttcaatgacctgagtccatgcattaagcaaaagatgtttaatttatttatttatttatttatttatttatttatttatttattttgagacagagtctcgctctgtcacccaggctggagtgcagtggtgcgatctcggctcactgcaagctccgccttccaggttcacgccattctcccgcctcagcctccggagtagctgggactacaggcgcccgccaccacgcccggctaatcttctaatcttttgtatttttcgtagagacagggtttcaccgtgttagccaggatgatctcgatctcctgacctcgtgatccgcccacctcggcctcccaaagtgctggggttacaggcgtgagccaccgtgcccagcccaaacgatgtttaattttagatgagtttctttccccatctcagcatctaccagaaaagagattttcattttcaaacctcatttctttcctaaggattacccatgcaaactgcatttcatactttcaaaatgccctttgcttattaaaaagcactgtgagaacacagacatgcttaagaaatttcatgatacacggagaacaaaaaaattctacttttgatcattctcatctttaccagacttgcttagtacaattaaattatccaccctaaaataaattttcttctagataccatatccttattttgttaatcctccatcttaagtgtattgatgtccttaatcttgtgtttataacatctgggttaaaatcacagactcacagaacaaatccaacccccctacttaaagagaaagaacagaggtcttccacctagaatcattttatgaacaataggggaactttaacttctgggaaaaccctagattcctgctttggaatcctttaggagtgggaacaggaatatgaacaggagaaaaccacctttaaaataaaacccgtgaaccctagttatagcacctttgaattgcaaagaatctgagaagttgtttgccacgattttaaaattaattccacaccaaagcatgcatgtttttcatttaagagacttcagaaattgactctgaaggactgtcagcagcgaaacctggttgcttttgtgtctcgccccagtactgctattaggagtgcagcctctggccaccagtgacctggacacacacccagctacccctctgagaagctgcgtctggaccactgcatctccccgggaacctcattgacaccacaggcttattaccatgaaggggtggggggaggaagaaaagagaatacacctaagttctccttagcaggcctgatacggtcttaacagtcactctcatgattattagctattaattccttatttttcttagttattacttgcatgattttcacttatatgagcatatttcccccaccatttcttaaagtatcttcccatataattattaattttaaaactaggttatcaataaatagacctatatttctacctatgtcatcctccaacggttattgataaatttgctacctttgcagatatgaggattttcatctcagctttccagtgagaagtgattgtttcggaatcatagttacaagtttcccttaaagtaactggaagtcttaaaagggggcttcatgacaaaacatcacatgaggaaaaatatcttaaggactagttagcagtgagaattttcaataaaatcatgagctagagatatcaaggctaaaattcaaatactaagagaagaaaatgttcctaactcccacaggtctggtccaactgttttaaaagacctgggcagaagggtttggaaaatggcatctaagaaggaggaaaatttagcacctacaccccagccctggccccccactccaccttcaactggagccttagagaggctcttttgagcaattatagagtaaaattacatcagaatatacattaatgagagtattttcaataatgcaaacgctgctaattatatcttttctttttaacacgaggtagaacattttacagcaaccctgagaccggccgtgtgcccagcagggagcctcgtattccgcacacacttggaaaggccatgacagcaggctgcatgatatgaggtgtgagaaatgaaaactttatgtgcatacaaatttagatttttaaaatattttcactaggggcataaataaagagaaattagaccactgggatttcagaaaacgagaatacagactgtgatttttgttttaaattttggtacttagagtaccccaatacctaaagaagtaaataattcagcaagttaccaaaagtaacacttcacttttaactttatactttttatataatttgagctattttgttcaaggaaggagagaaaattgcacacatttaaataaaagaaaggagacaaggaaggaaaacaaagggacacaggcaccaccacagacggccctttatcaggctaccatgacacatccatgcaacaagggctaccaaaaacgctacgaaaatacaatttccatcaatttacactgatttttattataccatagcacttgaaaaaactgtccacagttatttgcccccattataaaaatattgacactttaccacaaggttggaatttagcatgaacatccacatacccaccacctagacaagtcacatactgggagttaatattcgcaaaacatatatctgaaaaaggactggtatctgagatatacaaagaacttctacaactcaataataaaatgacaagtaccccaacttcaaaatgggcaaaagatttgaacaacatttcacaaattaagaatgccagcagtgtaataggtacaataagtataatcatcctcaacaatatctgttttcaggaaaatgcagattgaaagcacagtgagatacaactgcacacccaccagaccagttgaaagtaaaagactgaccacaccaaatattggtgaagatgtagaggaccacctaccattaacattttcttatacttgctttagtacatatcaacctatgcatccagccattaattcatcttcttgctttatgcctttcaatgtaaattgcagatataccctttaatacttcagctgggctgggcgcggtggctcacacctgtaatcctagcactttgggaggctgaggcgggcggatcacaaggtcaggagatagagaccatcctggctaacatggtgaaaccccgtctctactaaaaatacaaaaaaattagccaggcgtggtggcgggcgcctgtagtcccagctactcgggaggcggagtttgcagtgagccgagatcgcaccagtgcactccagcctgggtgacagagcgagcctctgtctcaaaaaaaaaaaaaaaacttcagctgcataccattaactagagttcaatattttagtttttatgtaaaattggcctaccttgatatgctaagatctgctgggttttgacaaatgtgtacaccaccgccaatcccagaaacaaccattcttctaattttctcccaccatagattagatgtgtctgttcttcaatttcataaaatggaatagcacactatgtacttgttcatgggatgtttctttcactctgcataatgtttttgagattcgtgcaagctcattcctttttattgctaagtagtgtacctttgtataaatatgctacagtttatccattcatctgtcagtggacatctaggttgcttccaggttttggcaattacaaataagcttctatgaatacgacctacaagtctgcatagacatgtatttttgtttatcttgggtaaatatctagggatggggttacagggtaggcatatgtgtgcttttatttaaaaattgctccactattttttttcaaaatggtcgtatcattttatattcccaccaacgatgttcagaaattgcagttcctctacaacttcaccaatatttggtgtgtcagtcttttcattttcagctgatctgggggatatgcagtggtatctcactgtgcttttaatctgcattttcctgaaaacagatattgttaaggattattacacttattatactgctggcattcttctttttttttgtttgtttgagacagagtctcgctctgtcgccaggctggagtacagtggcacaatctcgactcactgcaacctccacctcccgggttgaagcgattctcctgcctcagcctccccagtagctgggactacaggcgtgtaccaccacaccaagctaatttttgtatttttagtagagacagggtttcaccatgttggccaggatggtctcgatctcttgaccttgtgatccgcctgcctcagcctcccaaagtgctgggatcacaagcgtgagccaccacacccagccattgctggcattcttaatttgtgaagtgttgttcaaatcttttgcccatttttaaattggagtatttgtcattttattactgagttgtagaagttctttgtatatgtcagatacgagtcctttgtcagacatatgttttgcaaatattaactcccagtgtgtgacttatctattcatttcctcatcagtacctcttgatgagcagaatttttctttttagagacagggtgtcactctgtcatccagcctgaagtgcagtggtgcaatcatatctcactgcagccctgaccttttaggttcaggcctcctgggcaactgggaccacaggcatgtgccaccacatccagctaattttaaaaatattttgtagagatggagtttcactatgttgcccaggctggtctcaaactcctaggatcaagctatcctcctgccttgacctctcaaaatgctgagattacaggaatgaaccactgcacctggctagaatttttaaatgaagtctaacatcatttttcttttatagttattgctttctgtcatcagtttaagaaatttcttcttagtcgcaagtcatgaagatattgttttcctttaaaactttacgatttttcacttctgtattaaggtctatgattcatctcaaatcaattttcctgtatgaggtgaagtacagcacaagattcccttcttttcctatatggagcacatatctacttactgtatcaccacttcttgaaaacacatttctttccccatcggattgctttaacacctgtctcaaaaatcaaaggccctaacacagtgaaaccccgtctctactaaaaatacaaaaaattagccaggtgttgtggtgggcgcctgtagtctcagctactcgggaggctgaggcaggagaatggcatgaacccaggaggtggagcttgcagtgagccgagatcgcgccactgcactccagcctgagcgacagagcgagactccgtctcaaaaaaataaaataaaataaaataaaataaaataaataaattaaaaagccaataaggtgcagatctatttccagggtattctgctctattgttctattttcttgttaatgccagtaccatatagctttgattattgtcattttatagtaagtcttaaagttaagtagtatgacttctccaccaactttgttctaaattactttctccattatagaacttttgcatttctatgtacatgttagaattagtgaggacgtggtggcccatctggagcagccactgtggggacaccagctgcaatgggggaggtgtggccagggctgctgcactccatggagctaacacaggccaggaatgggcgggagccctgccccctaccaagtcggctgggcaggagccccatgctcccaggtgcagctgcggccacccagccacggctctggacccaggcatccctgcactctcgggggtccaggaagcacccccggtccctgcaggcttggaagtgcctactcgcactccctggcctctccccgctcccggcacccacttcagtgcaaagttgtagccaagcgcgggtgctgtcatgacccagccaggtgtgcacatatgcagagtagccagcactcccctccccgactggtgcttcagccccctctagactttggtcaccaatgaacgcaggagggagaccagaggactaagcgtgactttgtacaggcctgtgggtgcccctcagcatagacagctgggcaccacggacagcatgttgatggcagcgggaggcagacaggctcctaagcaggaagaagccagttcctggtgaaaccacaccttcaagcctgaagcctgggctccaggctgccagttccaggtgaggtccacggcctggagtgagaatttcattgacaactgtttggccattcggatggtgctttttccaggaccagccagggacacccaaggaccagtcagcacacacttcctccattgtgacaacataaaaaccccagattcagccactcacactctcctctggaagaccccgctgagagctggacacatgtcgggacaacctgtctgcagaaaggagctacccaccatgggtctcctcttcgctgagagccagacagatgttgggataacatgtctgcggaaaggagctacacactacaggtctcctgtccactaagagctggacactcatcgggacgatctgcctgcaggaaggagctacccacttcaagtctcctgagagctgttctgccactcaatgaagcttctctctgccttgctcgccctccaattgtccacatacctccttcttcctggatgcaggacaagaacttgggacctgcccaatggtggaactaagagagctgtaacacaaacaggggcaacgtccccctgctcgccatgttgcaggtgatgaggagagaagagaggcagctcttcggggagccagacctaggggctccccaagccagggctgtgacaccctctttggggctctgcagttcctggtgtctccaagtttctggatgccaccacattccccttgtctaggtgctggtgcctgcagcagaagccacttgtggtacatctgatctagcctcagccttgcacggaggcagcacccgtgccagggcatggagctgcctgccccaccgcagcagccactgtgcactggcctgcctgtgcacagtggccagaccccaagcttgctcgttcacaacccctcgccagtgtgcgcctggctcacccgtggcaggcatgggatccaggctgagagtgcgagccaagtgcagcctgccagggctgaatgagcccagcaggcccgaacaaaactcaggcaaaggtaccaccagccacagaggtttctggctggaaaagcaatactctaaggatcctgtgacattttcgtatacatttccacaaaaatacctgccgtgattttgattgagcttgtaccaaattcgtacatcaacttacagcaaactggcattttaccagtactaactcttccaaaccatgatcatggtttctctacgtaggtcttatgcagtttcaaaacagttcgtactttcccttgtgatttcttgcttgaccaatggactatttagatgtgtgctgtttactttctaaatacttgtgggtttcctagatccatttttgttattgatttctaatttaattccatggtggacagggaatatactctgtgatttcaatcactttaggcttttggagacttgttttatgacccagcacatagtctaccttggtgaacataccaagcacacttgaaacaaggtgagtttggcaaggtatagtgttctggaagtattaggtatcaggaaggtgaaagtggttgagagtgttatccagattatctatgtttttcatgatttttggttagctgttccatcatgggctaagagagcattgctgaaatctccaactatgacggtggacttctctatttcttttattctgtccatttttgcatcatatactttaaagctctgttattaggtaaatacacatccatgagttgttatctgttctctatgaattacccctattgtcactgtgaaatatccctccccatcttttgtacttctttgtcttaaagtgaattttgtctgctgcttaaaaagtcactccaacctccttaggctgttaatgtggtatataatttcctatccttttacttctaacctgtgtctttataattgaagtgtgtcttgaagagaacatatactcaggtcttgctttttaaaaaatccattctaacattttctgccttttaataacagggcttagtctattatcatttaatgtaaatattgataaggttgaattgagttaaaccatttggttaatttttatttttttctctcttttttttgtgtgtgtttctagtcctcttttcctgacttcttttagattttttttttagaatggcattttatctattggcttttgaactgtatcttttgccttatgtgtttagtggttatcctagggattacaatgtacatccttaccttttatatcaacttagcattaatattgtaccatgtcagatcaaatgcagaaatgttacaatcttataggtccatttaccacccctttgttgttcctttttgctagagttgtcatatgtattctaccaatgaatgtaagactatgtaagatgatgctacaattttgctttaggtagatatatgtgtgttgggggagtattttaaatttacccagatatttgtccagagagcattccttcctaaagactcaagtttccctctagtgtttttcctttcaccttttgaaacttcctttggcatttccttccagcagacctgcactatgacacattatcttagtgttcttttacctggacatgtattttgccatcattattgaaacattttgttggatatggaattctgggttgacaagtttatcttccttgagccctctaaaaatattgttccactctcttctggctttaataatttctgagaaaaagtccacagacattcaaatcattgttcctcactgcatgaaatgctgttttcctcagattactttcagtacttgtttttttttttaatctttggtctgcagcagttggactataatatgcctagatgtattttcatcatattcatctggcttggagtttgctgaacttcttgagcctggaaatttatgtcttctgccaaactgagggaacatctggccatcattttttcaaattttttttccatctctcctacacatatattaaacattctgatattatccataggtccctgaggctctgtttattttttaaatctttttctctcttcttcagattagataattattactgtcttattttcaagttcatagaacctgagaacatgaagatgataaaattacattctctgtgggtaatcattgaagggtcattgtgaactagacagaagctagaagaaacatacaattctaattttaaaaggaaattgtactaaccagagatattctatcccaagtgaaattcaagtaaataaacgaaactactactactgagcacctattaaaggtcagaaattgtactggcactttcatacttaccattgtatttaatttagatcacagctcattaataaaggtattactgcccacaatatacacatagtagtacagaggaacaaaaaagtaacttgtcccactaattagctcaagagctgagactttaacttaggactcccgttatagctttaccactcatctcattgaaaaaataaaaaattaagagaattgtcaagagttagacatattagctagcctgattttcttttgtaataagattagtatacaagtagatattggaagtatggggaacatagtacattacgatttcagcaaagcatctgtcagaagtaatatagtattacaaactaacaattagggctcttaacacagataaaactcttaaatgctgcttctatcacttactctttatgtcactctgtccaagcatttaaactctctaagctatagcttcccccttatctctttaaaggggaaccatgatgatactatctcaccaggttttagttaagaccgaatggtaaaaatctacagaatgcatttagcatagtactgtcacatagtaaatggtaaattagtgttaactattattattaaggcatgatatctcttgaacaaaaataattggaatataacataattatgaatattcatgaagtattgtaaacaacagttattaaccccattcctattcaacttctgtcaatgtctgctttgttttataattcaccaagtatcttccagaaaagaaagattgtaatggggtcactacagaattatacagaactgctggctcaaaaagaaatatgattatttataataggaaatcaccagcaatgacaagaatgcattcacagaagattgcttaaataaattatgatagactaatcttgcacatgtagtgtaggaggaaataaaagactagaaggagatacaccagaagattaacatgattcatatctcttcaactaattaacaaacatattaaataccatttgggaaaagattacatttttttcaacagtatttggattcagatttccattttggaatggggtgggtttataaggagccattctgggagacagaactatctccaaggtgactggaaggggatgcctcaagttataagagctcaacagaccaagcacagtggctcacacctatagtcccagaactttgggaggccaggaattcaaaaccagccttgggcaaaaaagtgagaccttgtctctacaaaagctacgaaaagttagccaagcatggtggcacgcgcctgtagtcccagctactcaagaggctgaggtgggaggactgcttgagcccaggagttcgaggctgcagtgagccgagattgcaccactacactccagcctggatgacagagcaagatcccatctcttaaagaaaaaaaaaaaaaaaagagctcagtaaatatttgactgaacaaatggtaggaaattgcccagtatctggtgctcagacacatccacaacactgcagagggcattcaagccctctggcccctgaggtgcctgccagagtttggacagacatttgtttgtctgatttaaggttcagtagaagtcaaatccctcattcgtttccaatgatgacaacatggtgctggaaacatttggtgcacttcatgacaattttccaggtatcaacagtaaaaacagaaactgcctgtaatcttacaacggtgctctatctccactgcctggaacaaaggttccaagaaggcctcttagcagttaggaaacatgctcatattttgcaacagaaagaagggaagaggaggcaggagaaggaagaaaagagaacaagatctgaaacgaagctagagaaggcattttaattgagctaaaaaacaaaacaaaacaaaacaaaaacaaattctaaaagtagctccacatcagagattcacagcccaggtttgcaacatctaagtttcttgtattacctcaatgggcatcacagaatgcaaaaaaaaaaatcatattacatttcatcttgtttccatttataaaagagaagatgccataggttgtttccggaagtggaaagggtattgaaaatgagtagaaaggatgaaaataaaaaccaggaaagcagggagattgccacgacttgcagaatccacctcgaacactccaccaggattccaagcatatcagaccccacactccgattccacggcaggttctatactatgttagtaagtcaaataagctttaacaaaacatcgaaatccaaaatgtcagccacgacctcatccaagaccactccacatctgcccaaactccccttacccctcccagagcactccttagggcgtgggagccgaggggcattttccaccacagctgagttcttcacgccactgtatcatcccctcctgcgttctgggtgtttgggttggaagcgatgccagcagagagtttttgtttgtttgtttgtttgtttgtttgtttgttttgagatagagtctcactgtcacccaggctggagtgcagtggcgtgatctcggctcactgcaacctccacctcccagattcaagcaatctcctgcctcagcccctcaactagctgggactacaggtgtgcaccaccatgcccgactaatttttgtatttttagtagagatggggtttcaccatgttggccaggatggtctcaaactcctgacctcaagtgatccacctacctcggcctcccaaagtgctgggattacagacgtgagccaccacgcctggcccggcagagatttttcttctcggatatcactcagctgtaattggagacatctgaacacccacccggatcatcacccccactcccaccccaggagccactttgtctaacaggggcatggaactcattcgactttccctgggttccagaaggaaactccaattactcagccaccactactgttagcgtgggaagctgggaagcacggaatgaagccgagttatgaatcatgcacacacagacagctgtcgggggatgcatgccaaccagaggggccacacatattccgtgttgatgggacagcacctgcaggaggcagagagaacttgtaacagatcatatgaaatccccattgccgtaattcctttttggaacagggcagggcataaaaagaagtaatccagatgatcagccagacatgaaaagaaaagaactgtcctcaggccagctgggcctcagtgtccgtgttggaaggacacttccagctttggtggtcttgatgtccataccctgaggaacctggcctctgagaaggctcccaggacccatgtggacaggggggctctgcaccattttacttgaaagggggctttacaggcatggtggcacgtgccttaatcccagctactagggaggctgaggcaggaggatcacttgaatctgggaagcagaggttgcagtgaaccaagattgtgccactgcactccagcttgagcaagagtgagactccacgtcggccgggcatggtggctcacgcctgtaatcccagcattttgggaggccgaagcgggcggatcccaaggtcagatcatcgagatcatcctggctaacacggtgaaaccccgtctctactaaaaatacaaaaaattagccgggcgtggtggcaggtgcctgtagtcctagctactcgggaggctgaggcaggagaatggcatgaacccggaaggcggagcttgcagtgagccaggattgtgccactgcactccagcctgggtgacagagcgagacttcgtcttggaaaaaaaaaattaagccacagatctagtataaccctctaatctcacagatgagaaacagacccggagaggctgagtgattcaccaacatcgcacaagctgctgtgtcaaaatggcaggcaagaaagttacagtctgagattttggggtttttttgttttgttttgttttgtttttgaaatagagtctcactctgtcgcccaggctggagtgcagtgccgcaatctcagctcactgcaacctccacctcctgggttcaagcaattctcctgccttagcctcctgagtagctgggactataggtgcgtgtcaccacgcctggctaattttctttctttcttttttttttttttttttttttagtagagatggggtttctccatgttaaccaggatggcctcgatctcctgacctcgtgatccacccacctcggcctcccaaagtgttgggattacaggtgtgagccaccgtgcccggcccagtctgaggtttttgtatttcatttttaggtaaattctgtatgcacatattacccaattttaaactgaaaactctattagcatcaaggtgacctctggaaccaaagggcaaagaaagaggcaggtacagacttccccatcattcctccttctcatctccttgcccttccacaaccagggaaaatccttctccgccaggcaatgacttcatcgtttccttctcactaatttgaatactcttatgggagagccaaacaaaaaatgaaaatgatgaatgactccttgtgcaatgcagaaaaaatgtggcgtttgggatctcacagtgacggaatacccctcatgcagaaacagaacatgcttctctccaaaacaaaaagcagaaacaacaaaggtatttcagagctcagaaggtgttttgccaaatggtaggtgtgtaaaagattttaaaggggcaggtgaaagcaaatcaactctcacctccaaagcaggtaactgttttatttgaaagaaaaacaaaagttccctctaaataagccacaaagctaagtcaggggagaaaaagaaatggaagagagggatgcctaacaagtaggaggaaaaatacctgctgggataactggcacatttattttaaacattgacagattttgactaaaacatatttttaagccggaactcaacctctatctgcacaccccatgtgtccaggtgactggtcagacctcaatcatgaacactaacgtctaagaatatctaaaaaagtttctacttagaaactactgttaaatcataatccaagtttgggcaatgctgctttcttatcatagatttcttactgcatcagaatcttgaaacatatgctcaggttttatttgcagtttccactgtcggtggctatcagcagcgctgtgtggggaaagcacctgtcttccttggtagctgaagaggagattaaaccaactcttggtggccaccccactccgtgtcagagactatgcaatgggctttccacagcaccacctgctctgaccttccccacatgaatggctgccaggtccgacccgcagaccatggctgaacaacggatgaacaaatgcactcagacacaagaatccagtgaaagagcaggctaggggacccggccacccacagacaccaaggagggtgctgtaatgagtcagcagccacagccccgaaaagccggcactgtgggcatttattcagtatagatttaatgacaaaggccttgagtcaacacatttgtgggcaattcacatggtcacccagacccggagagagtagttctgtgcgtggatgcttaagggcgaggttccaaggcctaagtaaactaacttacctagatcagtttatttatatccccttgttatctaacgtaagctttcaggcaccagataaaagaatctggctgccttcagccaaatccttttccgaagcttttgtaaaaccttccagccttccaagaaggtttgcatcttctgcaatttttcccaccacccttaccaatctcctacaaatggcattaccatgagtgggcattattgcagcttgtccattttaagatgagatgtcatggaatttgccccaggccagtagccaatgaagctccagagcctgccctgctttcagcatcccatgcagccttgcccagtgggaaaccagacttctaataaactcaggctggttattccaaggtcatgtctttggcccttctgctaaagaataactcctttacaatctaaagactagagtggaagcagttccaaccctcagcagattcagctcactactaaactaaaatcaacacatttggatttttctctaaggtaaacctgaactggggggaaaagagcatagagaagtccctgtcaccctctttattgattatcttttctaaccctaaaccttgccttattaccttttgtggtcttttattgcttgtttaaataaaacagaggcatttgacaaaatgaatattaaatgtagttacaatcaagcaattctgcagagtaataaacatctggggttttttttagagcttaaagagaatgtagtaatgtcaggtgcacgtgtttctgactgtcatggaaggttcaggggtctcaggaaggtgtgggtgatgcacaaggcatatccaagggactgcgaaaatgttcaaaccactgcagatttggctcttttgaaatgactgtgaattacctgtgaaaatgataactaaagggttaagatttcaaaaaaagagaaggttcaatgaaaaagagacttgcttcacatataagagaaacacaaacatggacaactgactatgttttctcatctttcaaaaaaagttggactaaaatatttttggcacaacagtaaccagcaacaaacaattggttctagtatgagaaaaaaactgtcgaaatcttcaaacaaaaactccattccaagaaaacacctaccacaccaggcacggtggctcatgcctataatcccagcactttgggaggccaaggtgggaggatcgcttaaattcaacagttcaaggccaacctgggtaacatagtgggacccctgtctctacaaaaaatttaaaaattatccaggcatggtggctcacgcctgtggtcccagctactcgggacgctgaggtgggaggatcacttgggcccaggaagttgagactgcagtgagccatgatcagaccactgtactccagcctgggtgacagagcaagatcctgtctcaaaaaaaaaaaaaaaaagatacacatatcacagtcctgaacacagaccacaccaatctgtttcatggacgtccacagcactgctgctgaaggatgcgttataaaggctaaaaagaattgcacacaaagtttaaataataatgagagttccataaatattatctatgtactaagagtctgctgacatattatctcggcgcatcctcaccctatccagtgaggcaccctgaaggagggccccacatcttctctattccccatgggtcccagagcctcacacaggatcttgcacacagctggtgtgccagagaaagtagttaagtaattaaactttttatttttaagtagactattaccagctacatgacacagataaggaaatagaggcataaaaggttactgattttcccaagtttactcgtctaataaattgggattccaaaccagggccagcaggaccccatcccaagatctaagtaatgtaaaatgaatgaaccacgggctgatatgcaatttctgcaaatactttctaccccagcttttctaccatgttatctacttttttttttttcctaaaagtctcatacaccctcaaaagatgaagactgccaccattgagaacattcaaaagataggtgctgttggccaggcaccgtggctcaggcctgtaatcccagcactttgggaggccgagacgggcggatcacgaggtcaggaaatcgagaccatcctggtgaacacggtgaaaccccgtctctactaaaaatacaaaaaaaattagccgggcgtggtagcaggtgtctgtagtctcagctacttgggaggctgaggcagaagaatggcgtgaacccggaaggcagagcttgcagcgagctgatatcgcaccaccgcactccagcctgagcaacagagcgagactccatctcaaaaaaaaaaaaaaaaaaaaaaagatgggtgctatgggtttgaaagagcttcagcagaatccctgccatggctgggcagcttgccctaccctgaaggaggccatgttcgctccactccaggtgacattcactcctgctgttctgcgcagtcaaatttgggatgcttcaagttgtccaatagtaaaatgatactcaactgcaatggattgaatgtttgtgttccctccccaaccctctgtcaaaattcatgtgttgaaatcccagcccccaatgtgatggtaatcacttttgcaggtgattaagtcatgagggtggagccctaactaatgggattaatgcccttctatctgaggaccgttgagagctctctcaccctctttctgccatgtgcggatacaagaagtcagcagtcagcagggtctggtggctcatgcctgtaatcccagcactttgaaaggccgaggcaggaggatcatttgaggtcaggggttcgagaccagactggccaacatggtgaaaccctgtctctactaaaaatacaaaaaaaattagctgggtgtggtggcacatgcctgtaatcccagctgcgcaggaggctggggcaggataattgcttgatccccggagacagaggttgcagtgagccaagatcctgccactgcactccagcctgggccacagagtgagattctgtctcaaaaaaaaaaaaaaaagtcagcagtctacaatctagaagataatttgaccaagccgggtagcaccttgatctcagacttctagcctccagaacggtgagaaacaaatttctgttgtttataggccattcagtggatgccactttgttactgcaccccggaatgatgaagacatcaacatcaacgctgagaggacactgggacggctcagttctaatgaaaatgcacctaaatagaacacattatcactatcacaaaatggtaaacatcaaaataactctaccatacttgaaaaatcggtgacaaaatatgaaaataaacaaccaagaacactaaaaattaatgtagaagcttctctgaaaaataccaggccacagaataattcaacttcaggagcttggcatgtgaaaggttaacttattcaggtgttgaattggaacaacaaaaaaaatttgatggagaatttgccagaataacccttcagtcacaaccgttgccaaagtcaaaggccaaagttatattttaaattttagaagtaaacattaaaatgaaggtttcttaaaattctccaataattttcacttttaaagtaccaaactgacacataaaaaaattcgtgctaattatcccaagcaatcaacttctttaaaaccctttatttcacaattacgctaatatcccattaatttgggacacttaccaatgtatttattctttgctcattacctatgtgcacattaagagtacaccaataacacaatacaggcattaatatgtaaaacatcaacaaaagccatctggaaagctaatgaataatcaagggatttcaaattaaactacagaattttcccttagaatctttaggacaacactgtcaagctcaatctattcacttcgcctccagaatcaatttttcaaactttatgacaggtctaatcgcttccacctgtgtctccagcttgactcttgactggcatgctaccagccagggtggaaatgtagacaaagacccctattaggatccggctgtttctctactgtgaggtcactcagccattaaattagttccagcccaatttctgtcctctcgggcctcgacttcaggggaggagggtgcagagttgagtcagttagcagcacagacccagaagggaagaaaagggggaaaagatgtttgggactgactaggtaggtgtgcacaaagctgaaaagctggagttggtcccaaactctgaaatcgaaatactatctttcttaaatgactgcagctattctccccaatgcgatcctgcccccttcccatttaaaaaaaaaaaaaatatatatatatatatatatatatatatatatatatatatatatatatatatttatttatttattttatgggattgtgtttccttttcttctccttcatttgtagaaagtcaactgtctcccacacaacatttcctcaactcacatgaggctgattcacaaaactagctcagcaacctaaaagcgccagaagtcactgagagataaaaggctggttggtggaggctctggcgtgggcgcatcaccaggtcaaaggaggtgagctgaagatgcctggagagcatctagtgttccaacgcccctgatctcacagctgaagacagtaaggctcagggaggagagactgtcaaggtcacagagctagtgaatgacaaagtcttggttccagcattttccctactagattacgagctctacagcatcagaaacaaggcccaacacacagtaactgcaaaaacaaaaacaaaacaccacacatcgctcctatatcactgtgcccacctcctttctgcccaaagccccaatgatcagaccaagaacggtgtacacaactttacaaactggcacaggcactaggatctccttctgcaaacgcaccgtcaggcatggacgctgcctgagccgccaggacacctctccagtgcctaacacagtgcctggcatacaggagttgctccagaactgcttatcccatgaggcaaagaagtcaaatctaagcctgaaacatcaagggactcaaacggtgacaaatgagaaatcagcttatttaataagaaaatctaaaatattctttacaaatacaaaacgtccaaccttggacaacttattcaggatgcacaagtatacgaaggaaattggcgtaagcaagtttatgcccatctgctcaccacacactgcggtttcacgtcatttcactctctgatggagacttggtataagtcaatcaaaaaagacgctattggccaaataaaagatgattccaaaaatagcacaatgactcagttaccccaagctcctatgtttcacagtctagcctcatgctgtctccagagggttgactatcatttatcaggagattaaatggaatgtgccacacacccactacgtcaaggcagactgaactctgggaggggcttttcctgcagtgacaatggatttgcagtggctggtccacacccacttccctagaccccatcaccaccaatagctcacattttgcaaagggattcctgagctgtagctgtgggatgtgagcctggaacacggagaagttcactgtcccagacacagacacagacacagactggacccatgtccctgggactctacttaactggctgagctaactgctcacagggaaacctactaggaaatagcacagaaaaataaaggtctctggcgtgaaacaaaactggcaatacacacagcatggtgatatggttatgccctgtgcccccacacaaatctcatcttgaattataatccctgtaatccccataatccccaggtgccaagggagagactgggtggaggtaatcggatcatgggggttgtttctcccatgctgtccttgtgatggtgagttctcatgagatctgatggttttgtaagtgtttggtagttcctcctgtgttcattctcctgcctgccgccttgtgaagaaggtgccttgcttcccttcaccttccgccacgattgtaagtctcctgaggcctccccagccgtgctgaactgtgagtcagttaaacctctttcctttgtaaattacccagtcttgggcagtactttatagcaatgtggaaacagactaatacacatggcatccagaaggtgttaccctgacaatagtgtggaaaagcaattcatggtcgggaagacatgtcagagaaaatgactggagcccaggataaaggatgaaatcacgttttctaagcaaatgagttgggtggcacagccaagtcagattcctggggaaagcgcatcactaacggggttttgagtttttactctgggggtggaggggactcagtcatcagcaagcggcacccacattgccctgtgctacttcctctccccagagtgctctcccctctattcaatcacaaacacacttccaaatttgtggggtggagacacaaggtgaaggcggtggggggttcatgctctaagacaagccactcacatgcccagagagatcaaaagaaagctctctacaccagtaccatggtagctcagctggtactgaaataccagccctcaaaaaataccacaccctcaaaaatctgtcagaaatctccaaatcctcctagatgtgtaaacacctaaaaaaaattcctctaattaccttgagtaagcactgaaacaaaagcagtgttataagtcaaataattatcttcacctgtgatcctaaatctggtagaccctggcactatcagaaggtatactactttcagggcctccaagtatttttcttggtagtctgaaaaactgaaagtacatgcctgaggcagaattctaattgtcttccaatgtctaccaatgtctaccctcctttcctccttagtgatagaagcctggtttccagttagatccatggttgcctactataaagaccacatttatttcccagccttgtttgtaggtcacgtgactaggtcctgttcataatacataaacaaaaaggccatgtgcaacttctgtcccttgaagaatggggatgtagcttctttaccccttcctcccacttactggctcaagtaagaacataaacactgggatcaccatcctggacatgtgctgaaggtggccgagcaactcagctgggtccttgacacgtgagccaacgcaccaatgctggacttcccatctcagcctatctcatttgcaggagagaaaagtaaacttccatcctgttcaagccacttctattttcagatatctgttgcacacagtgaaacctaatcttaattgacctaggaaccggtacctgaaccgggggtgctaggtctcagattttatgtatgccccagaaacaaggcctaaaaatgcagcctgatatggaggagatgggcagaggatcactggcaaagacacaggtctcacaggttctcgactgctgactgccgcagcaaaacctttgatcgagtcctgaccttctatatgttgggaggtagacctggtgtctgttagaagctgtatccttacaggaaacagctctgaaaattcaaaatgtcagtgcttgccagtccttgacactctcagcaaggttcaatcaagagaaatgatctccaactaaagctaactagtctcaagaaagtgggaaagaatacagatttgattagaaaggagctctgtgtcagcaaccagcaatctaagtgagcctatggggctgtccctgcagccccagcaggagataagacagatgctttaccacatagagcccagaagccttgtgccaaagatatgattaagggcctggccttccacccaagcccacggtttcatttggcccaagggagttgctattaaattgggagggaaaggaatggcagagcgctgaggcctttaaaagaccagagtttttaggctgaaaaactgtctagacaagatcttgatggttactcacatggaaccaatcagaagcaaacagactagagggctactaaagtcctgagagacttgtatctctacagaaaccttaaggctggcctataaaaagctgtgactattcagtcctcaaaacaacacccagaccccaaatcctcccagcaagcgggttttggaagcccatcctctccagcatccatctccgatgtggtgcagagaagaccctttcagaaggcaaagccatgactccaaaagatcccaggcaagagagttcccggagggcagaacgcgggttgccagacagcgacaaggaaacatagtggccgccagtgcagggggtgcagggagacttgatggtcgtgatttctactacagcagtgtggcacatggtgtgctgggggcagagagctcgtctgtttcagctaacagattgcaagacctcaacaggtacatccggccctaaaagagaaaacggcacatcatccagagatcctgaatctgatcaagtggaaggaaatgaatgtcataccagggccatcttccttgaggaagaggtgagagttttctatggaggggaagacaaatgcatgtggatatctgggacctcagcagaaactgctggctgttccccactgtgtccttccccgtcttccttaggaatacaactcccaattttcagctggtgcaggttccatgatggggaatggtagacggagaaaaagagattttgtaaatcatatgatcaagatctatatctaacataaatttcactcctacttcagcccattaggaaagagctgctcaattgctgaagaaatgatacacacagacgaagagagaaataagcattgagagaacccagtccatagttctgaaaattcttcttgttctatccaatagtttcatcaaagtgatagtctcatcatgttgcccaggctggtctcaaactccagggcttaagcaattctcctgcctcagcctcccaaagtgctgcaattacaggcatgagccacaaaaaaagtatcccacttttttttgagatgggagtcttgttcggtcacccaggctagagtgcaatggcgcgatcttggctcactgcaacctctgcctccaaagttcaagcaattctcctgcctcagcctcttgagtagctgggattacaggagtgcaccacaactgcctggctaatttttgtatttttagtagagacagggtttcactatattggtcaggctggtctcgaactcctgacctcaagtgatccacccacctcggcctcccaaaatgctgggattacaggtgtgagccaccgcgcctggccatatccaacattttttataaatattcagaaacaggaacaattccacacacagtaaattctgttacctagaattctacacactggtataatactagtgtttgacactgttccagtaacaactccaaagcactaaaacaacagtccccaacctttttggcaccagggtccggttttgtggaagacagtttgtccatggacagggggtttcgggatgaaactgctccacctcagatcacgaggcattagtcagattctcataaggagcacgcaatctagatccctcacatgcacagttcacaatagggtttgagctcctatgagaatctaatgctgccgctgatctgacagggggcggggctcagccagtaatgctcacttgcaccactcacctactgctgcgccgccccgttcctaacaggctgcagaccacagcccgggggtcggggatccctgcactaaaaaataatgtatgagattcgtggatttgtttaaagcacacaaaagcagcaactggaagagaacagctgccagtacacataacctattattactatcacaaatagactatgtttccataagtatagctcgttaacatggtttggatttgtgttcctgcccaaatctcatgtcaaattgtaatcagtgttggaggagggcctggtgggaggtgatttgatcgtagaggtggatattccccttgctgttctcatgatagtgagttctcatgagatctggttgtttaaaagtgtgtgacaccaccccctttgctctcttcctcctgctcccatcatgtaggacgtgcctgcttccccttcaccttctgcaacgattgtaagtttcctgcggcctccccagccatgcttcctgtacagcctgcagaactgtgagccaattaaacctcttttctttgtaaactacccagtctcagttctttatagcaatgcgagaacgaactgatacactcatgtaggatcaaatatagttttagaaatattttagtcttattcttagaatgtaacaggccatgtattttgtgcatccatctatctcgtggtccctctgacatcaagatgacctcttcaaatgtcttctccttaaaaaggcaactgcctccccgcgccaggaatttcttcccaggttcactgactcagtaggtttctgtgagtaacctcacttcgtagtgttaggaaggaaccctgggaacagcggatgcagggcatctggtaagctaaggccgccaacaaccattcatccagtatcagctctgcaccaagcaagggattcataattaataatcaaaccaaacaagaagagaaacaaagattcctaaacaccctcagaaaggccaaaatatttttcccctttgtaaaagtaaaaactcttaaccctatgggaggttccacctctagtgttggcaagctcagcttcaatgtctgtcaaacacttttacagacccaagtttcctaaggcagaggtttttttttttttaagtttaatatcaaaagtgaacttcctgatatccaagaatattaaggcaatatatttatacaggttcttttttcacccaaaaacacaggctggacagcgtgtggtgaagcccagccctctgcggatgtgcgggagcctcagcctgtccgcactctcagggcgtgtgctgccctcttggtgacgcgctgccctcttggtgacgcgctgccctcttggtgacacgctgcctggccacgagctccaggaccacacttccaaggttcccaggtggcaatgacacgaaatattcttcagtattctccacagaaacaacaaaaatggcctggaagtacccgtatttttctatctgaacttcacctccccaaatcttttgttcaataacttgtctcatttttttattcagaaaatgtaactatcgcgagttaccccttcgatataatgaagtcttcgcttgagtaacaaaggattattacagagtttgcaacaagcaagtgatgactgttccatctaaaagaacaggctttttccttttctactgggaatcaatggatgtcaggggtgaggtggaaacaggagagttaagaagcgctgaaaaatgaaagtacctatgacatcacaaattaactcagtacacaacaattactaatgaacacggctcacagctcccctcccagcctgcccccattgctctgataatcctcccaaacaactctgccaatgcctcctctaatacaacacacatactaacactgtcattctgatgactctaagtgtgacagtcaagaaaatgctaaagttggctcatcattttatatccatatagcattaaattccagaaactattatcaagaaaaaggccaaaatattcccatacattgaattatacatctgtctaatcatgtggtcccatgagtgaaatgcctagaaactatgaatccagttatttttggaatatttcacgccttaaattttaacaccgcactgagggaaggcacttttgttattccctccctctataaccaaattttttaaactaaaatagtattagtactattggggagttttaaaaaattcctttcatttgttttctatttttttaatctttaatcagagtctatgtaacagaaggaatcaaaaggaaaacctgcagtaagagtaaatttctaatatccaaatggggttatcaactgcttaaaaaaggtatgggggttgggaatgggtggctcacgcctaaaatcccagcactctgggaggctgactcagaaggatcacttgaacccaggagttcgaggccagcctgggcaacatggtgaaaccctgtctctactaaaaatacaaaacttagctgggcatagtggcgtgtgcctatagtcccagctacttgggaggctgaggcaggagcaacccttgagctcagaaggtcgaggctgcagtgagctgtgattgtaccactggactccagcctgggtgacagagcaagatcctatctcaatcaatcaatcaatgaataaatgtattggatagcaatgtaccaaaaacacttttcaaaatacaaagctctgacctttttcaatttacacagcttaggtgtcattcaaacttcctattcaaatgcccctgaaaaacatcctgtattaaatgtctaacactgattgtaactgcacaaaagaagaatgataacctgagcaataatgccaccggttaaacatcttttttcataatattcgtttatcaaagaacattctgagggcctgattcaaagaagcaagacacaaagcacaaccaccttccattcccataaaaaacaaacctgtgatcaaagaacttcaatttcctttcccacgatttaactcttctaggacaagagtacttccaccttgctaataggtctggtcaaacgtattcctctacaactctatcccctccccgtctattggtaagagaggatgatcaatggaacaggactcctctgagcagatgcagacctgctcacaccttacccatccaggagacgcatcgttgtgggggtcacttcggcaaacaaaattactttccccaactgcttggtctgcagattttggcgatagatctctaagttgaaatgttctgatgagaaggcctccatgttggtcaccacaggtatacaagatggggttatttctacttcagacacgtaggatgaaacaaatctaagagagagctggccggattttatttctccctcggagtccacatgtttcccaagccactgcataagaggatccctgatttcctgtgtcataaagaaagaaatgagatggtcgtaatttggcattacattagatcatggtagcttttccttataatgccattttggtaatatgagtacttcctaattcatgaccaagaaaagctagattaacatattccatacatctaaacgattagacaatatgataatcatatacttagtatacttatactataaaataagctcttcagaaaccaggatccaagaaaatcagttcagttcatgattatacttcctatcttacatcttacattctctcatgattttcaagattcccctccagtccagagttcataagtagttctccagtcctccgttcattttacggaaaacttttatctttttgccccacaaagaaattcattatcctatttgcaaaaacaacaacagaaaaccctgggtgaaagaagtcacagaacacaaagcactcaaatacaagaacactcggtctcagcctcacatcttagagaatctccgcttcctcttgtaaagacaaggcaagttgatcaccaacaaagaagacaataatcttcacaaagggaaagtggggtaccccaaagctgctttctgtttgccccaaatggaggtacaaggaggagaaggaaggcaaaacctagaagagacgttgtccaatccaggcacagagctctctactctatccccaaaaccacaaggctggaggaggttcccccacgccagaccttagaggtcccagaggccttcctccagggtggtttatcaggaactgagggctgagggaagtcatcatctcaagaggcctgtacaaaacttactaagatctcagtaaacacagatccaggctcttaggccatcctcctgcaaacaccaggccctttacgtcccaaagctccctgtggctacagagtagtggcatcagagatgaaacttaattcaactaatttcaattgatcaacctttaaaactcacatctagtttgcagataatacagaggagaagagaacgagtcaaatgacttcagaagaaagcattcaggtccgcgcgcagtggttcacacctgtaatcccagcactttgggaggcccaggcgggcagatcacctcaggtcagtagttcaagaccagcctgaccaacatggtgaaactccgtctctactaaaaatacaaaaacttgccaggcatggtggcgggtgcctgtaatcccagctactcaggaggctgagacaggagaatcgcttgaacctgggaggcagaggctgcagtgagccaagatcactccactgcactccagcctggcaacaaagagtgaaactccatctcaaaaaaaaaaaaaaaaaaaagacaagaaaagaaagcattcagaagaaatccaggggataaaacattttacagaacagccgggctggaatcttcaactagtcaatgtcacggtggagatggggtggggacacagaggtggagagggagaccccgtctagattagaaggggcttaaaagacataatgaaacacaatgggtggttctttattggatcccaacttgaacaaactagctggaaaggacaattaggaaatctgaatgtgaacagtatgcattagacagcaaactggaattactgtcagttttaataggtgtgacaagggtactgtgggggccaggcgcagtggctcacacctgtaatcccagcactttgggaggctgaggcaggcgaattgcttgagctcaagagtctgagaccagcctgggcaacatggtgaaaccctgtctctcctaaaaatacaaaaattagccgggcatggtggcgtgcaactgtagtcccagatactcaggtggcagcggtggaaagattgcttgagcccaagaagcagaggctgcagtgagccaagatggcgccactgcactccagcctgagtgacagaaccaaaccctgtctcaagaaaaaaaggaagtactgtggtgacataggaaaagtccttaatttttaaaaatgtatatacgtcatgaaatctgtaaaatttacccccaaaatacataaagtaaggcaaaatgttgataattattcaactatgttgataattattaaatctagatgatgggtatttggggtatgtgttacagtattctctctattcttttccatgtttgagaactgtcataattaagagtaaaaaaaagtggtgaaataaacataagctatttaaaaataataaattcaggccgggcacagtggttcacgcctgtaatcccaacactttgggaggctgaagagggtggatcacttgaggccaggagttcaagactaacctgggcaacatggtgagaccccgtctctaataaaaatacaaaaattaactgggcatggtggcatgcacctataatcccagctactcaggaggctgaggcaggaaaatctcttgaacccaggtggcggaggttgcagtgagccgagatcacgccatcacactccagcctggagacagagcaaaactgcatctcaaataataataataatgaattcaattgaccatacactggcaacctattccctctgtcatccattcaacaaatgttacgggatatctcccatatggcaggcagtctcacaggctctgaggacggagcaatgatcaaaggggtcaaaattcctgtctttggagggttaatgctataatgtgggagtcagaaagttaaaaaagtccgggcgcagtggctcaggcctgtaatcccagcactttgagaggctaaggaaggcggatcactcgaggtcaggagtttgagaccagcctggccaacatgacaaaactccatctctactaaaaatacaaaaaattagccatgcatcgtggtgggtgcctgtaatcccggctacttgggaggctgaggcacaagaatcacttgaacccaggaggcagaggttgcagtgagccaagattgcgccactgcactccagactgggtgatagagtgagactcagtctcgaaaaaaaacaaaaaacaaaaaacaacaaaaaaaacaaagttaaaaaacagtaaacacaatacacagaatgttagagagtaacacgtacaaaggagggacaagaaagcacagaagagagggaggccacttcagaccagacagatggaggacctgctaagaaggcaacgcttaaggaaaggcctggagcaagtgaaggaggatgctgggacaaaatccacagaactatgtttttatatttatttataaagggattccagcaagtgcagaggctcccggagcagggaaagagcctgatcagggcacagcatttgagcagagtgagcctgggcagaaggtggagtgccggggccagaaaggcagagggggtggtgagagccaccgtccacatcgcggagggcctcaaaggccacagtaaggacggggctttcactcgaggagcaacagggagccccagaaggttctggggaaggtcgtgggatgtcctacctctgttggagcaggatcaccccactctgactcctgtgttgagaagagcctgaaggggaacaaacaagcagagaaactagttataaagtcacctaaatgagctaggagtgagactactgcctggaccagcatgcagcagacatggtgagaaaggataggattcacagtagactctgaagtacaggctacaagatttgctaacaagtcatatctgagatgttagagaaaacaggggctcaaaaaagagcccaagatttctggcctaaacatctggaaggacagatctgctgctggaaatactataggaagagcaggtttggagaggaagaggcaggaggtgagccctgggtgtgctaagcttgagatatctattaaaaatcccacgggggctgggcgcggtggctcacacctgtaatcccagcactttgggaggcccaggcagtcaaatcacttgaggtcaggagttcaagaccagcctggccaacatggtgaaaccccacctctactaaaaatacaaaaattagctgggcatggtggtgggcatctgtagtcccagctacctgggaggctgaactcaggaggtggaggttgcagtgagctgagatcatgccactgcattccagcctgagcaacagagaaagactcggtctcaaaattttttttaaaaaaggaaaaaaaaaatcccttgaaaacaatgaattggcagtagaacatgtgagtccagaatccaggggagaggtctgcaccatggatatcaatttgagaattgtcagactatgggtgatcatttaaagccaagaaagaggataagatccatgaaaagagtgactgtagttaaaaagaggatgcaaagtagggctgctgtcacaaaggactacaaaccgggtggcttgagatgccagaaatctattcttacagttttggaggacagaagtcaaaaatgaacacgtcaacggggccgtgcctcctgggaaggctctggggaaactagtgttcacgcctttgcttctggtgccgctggcactccatggtgcccctcggcttgtacacacatcacccccatctctgtggccatcatcacatggcgttctcctctttaagtgtcccgattctgtgtgtcctctagtcttctgaggacagcagtcgtactggattagggatccaccctaatgacctcatcttcacttgattacatctgcaaagacccagcttccaaataaggtcatattcacaggctccagggctggggctttcacatatctttttgggggacacaactcaaccaacaatagcagtccatgcttaggtttcagggagatcaaaaagagtgtgcaaaagagattgagaaagggagagaaaaatcaagtgtgtctgtggacagcagtggggggcggtggttgcgggagtctcctgactccagtttggaaggttggaagacgatgacagtgccgtggggagagggctgagaagtcaccgctggccttggtgccacagagcccagactctgatgagagcagtttgagaggcgtgatggaggccaaagtcagatgggagtagtgaaaagagaaaaactgcagactccaggataaaactctggcaaagggtctcctttaaagggtagagaggaatggggcagtggctagagggaggaatggggtgaaagcaggttttgtttggtttagaggggagaaacagcagcattttcagattgatgtgaaaggtcccctagagaaaagaatccaaagggccaagtggggtgggacctagcacagaagcagaaaggtcagccttgggagcagagacagctcacccatagggatgggggtggctcaggttcccctctgcggacacctggtcttatgaccccactggctgcagaactcccttggcccttgccggttgcacagccatacgggacagcctggtaactgaaattcgctgctcccaccctgctccacagctgcagggaggtgggaatcctggtgctggcagccggtagaagtcatcttatgattgcttctatgttctcaataaataggaagcaagatcatcggctaagagagaaaagaaggaaggaggtgttgaagtttggggagggaggaacgaacatgacaacagggagaatgagaagacgaatgcagtggggagaatcttctgagcagcgccttccccagggcagctggaagcatttgagcaccacggaaggtcagcgactctgaactgagagtgagaagtccgcatgattttgtgtttttatcctgccacagtcagctatccagccatgtgggcttagcagagaggaggcagtgagctgaaggtgtacagaaagcagtaactgagactaaccgaccacaaatgagacactgctggagacaggaagataaatatgagtgatcctgttggggaggagagtgagaggaatgccccaggaccaaaaagcttaggtcagcaccagagagagctcccagagaaggcatgcaaaataaggggtgatcctgcttgcaaagaaaccagaaaagttgttggaagaggtcaagctcaaatgagctaccaaaagctacatttgggtcctatcacagtactaattttcggttttcggactacagaataccaagatatatttcaaatggattattccctgttcatcattctttccttggtatatactctattggaagaagaagaagaaatgaataaataacatacaaaggtgatccccaaacctcaaatctggccattagttataaccaactctgcccctaaaactttggtcaatgcccttaaagcataaaatgcacagatctgaatttccatcactttccccagggcagctggatgtcaccaggtcaccacacaggctagagatacatataggtgaattaggttaaatcacaaaaacagaaagataaaactattatttaactcaagcagagagctaagaggttattcatcagatgatggtaatacaaatatcccattcaaagtcaatgaaaaccaggataaaatgaaaaagaaacaaccagcactaagtagaactttcagaacaggaataatgcaggaattatcctctaaagtgaatcatccagattgactatggtatacatcattcatttaagaaacatgtatggagtacccacggtgtctcaaacacagtaccatggtagaaagagaagaggaaggacagatattgctatagtttgaatctgtcctccaaatttcatgtgttggaaacataatcccccaattatatgttgatggtacttggaggtggggcctttgggaagaaattgagattgaatggggtcatcagggtagggcacctatggtgggattggtggctttataagaagagaaagaaagacctaagctggcacactcctgccctctcaccatgtgattcccttcccatgttataatgcagcaagaaggccctcactagatgctggcaccacactcttggattttccagtctccagaaccaagagctaaataaacgtctattctttctaaattgcccaatctcaggtattctgttatagcaacagaaaacggactaagagagatgcatacacataactacaagacaaaaattcactcaaactattcaaacatacacttctctttggcaaagtaagtcaacctgacttgccaaatttaatcatctattcttatgtgcatgcaagttgagagccatattctcaagaaattacatcatcattgttatgtctactaattactaaagtaacaatctaaattatttgtttttgaaagcaatacttagacacgtacaaatctgcaaaataaaactgataaaagcaaggcatgcaggtttttttcttatacttattttacataatctttcagggcttactcagaaccaagtgaattactcagaacaaagagaatctaaaaggtatcaaatgaaaccagggccctcttatgaaacataactatataccacccataattctcttaaatatttatattcactatagtcaaatacattttaagtaccataggaagcatttagcctcccccaaaactttctccccgctccaccattaaccctggacaacataaaaattctgaataaaattctggttgtaagaaataccaaaattactatctgtttgatataaatctgcctggcatgtcttctcaaatgcactcaaattatgattatgacttgagagttgcatatacagctgctaataatacatgtagggaaaaggaattaattcatgactcttgcctaaactctcctaatgaccatgcaatgtaaaaatgttactgaagaaaaaaggtttggatcatagacatcaagacaagtgggctgacatataagtagcactacccactctgcaatacgcaaatgcacctatttctttgaactcaactatcagaggatagctaaaacgtcacttctatagggaggatgtctctgacccacagccgttcacaaactttcgtaaacccttagttactttatagcacttatcacgactatacataatttgtataagtgcttattcaatgccacactgtcttattagaatataagttccataaagataatatacatatgttcctgttttgctcccaacggtatccatggaacctaggacaaaagtgcatgcttaataagcatttactgtataaatgcacattaaaaccttaccaaggaaaactctccaaataacagatagataggtaatcaagaggtaaaactcaaaaaagacaatgagagagtatggtcttgagatggctacgtaagcatcaaaaataatgcacagtctttgaaatcattacagctagttctattgacaacaaacaaccactatcagattccacttcaagggggtttataaaattctaattaatgttatttttctaacatttaatcttcaagaatttagtatttctcttcttctaggatttcaggttaattaaatatgatttgggtggaaccaacagctgaatgctttatagtcacataaatgtggcccttttaaatcagccacagcaccagtcattctcaagaaaggtgaatatattctttgtcttttattgggtcatgttgcacaggacatgaaaatccaaaggaatcttaaaaaaaaaaatagaactaataagtgagtttagcaaggttgtgggatacaaggtcaatatacaaaaattggctgggcacagtggctcacgtctgtaatcccagccctttgggaggccaaagtgggtggatcacttgaggtcaggagttcaagaccagcctggccaacatggtgaaaccccacttctacaaaaatacaaaattagccgggtgtggtggcacacacctataatctcaggtacttgggaggctgagacacgagaatcacttgaacctgggaggcagaggttgcagtgacctaagattgtaccattgcactccaggctgggcaacagagtgagactccatctcaaaaaaaaaaaaaaacaaaacaaaaattgggtgcatttccatatactaacaataaatatttggagcctgaacttctttaaaatatcattttaatggcatcaatagatctgaaatatttagggacatatttaacaaaatatgtgccagacctgtttactgaaaactacaaaacactcctgaattaaaaattaaagatgtctgagcatcataactcatactcgtaatcccagcactttggaaggctgagtatggaggatcacttgagcccaggaatttgacaccagcttgggcaacatggaaagacctcatgtctaaaaaaaagagtttttctttaattagctgggtgtggtggcatgcacctgtagtcccagctagtcaggaggctgaggtgagaggatcacttgagcccaggagctaggctgcaacaagccatgatggcaccactgcactccagtctaagcgacagagcgagaccccatctcaaaaacacaaaaagaaaattaaagaggctgtaaataactgaaaagatacaccatgttcatggatcagaagactaacactgttaagatgtcaattcttcaaattaatctatgggttcaatgtaatcccagtcaaaatcccagaaggctttttttttttttttttgtagaaattaacaagctgaaaatagaaactattttaaatggtcaaaacaattttgggaaggaacaaaaagttggaaaacctacattatctgctttcaagacttactataaagttgcagtatatcaagacggtgtggtattggcacacagagataggtatagattactggcacagaatagggtacagaaatagggccaaacatataagtgtgattgattttttttaatttttttgagacagcgtcttgcgctaccacccagtggggagtgcagtggtgtgattacagctcactgcagcctcaaattcctgagctcaagccaacctcccaccttggcctgtttgattgatttttgacaacagtgcccaagataactgacttgaaaaatgataatctttgcaatacatggtgctgaaacaaacattcatatgcaagaatatgaaaccttgatctctatctcacatgtatataaaaattaacttgaaataaatcatagacctaaatgtaaaactacaaaccttctaaaataaaatacaggagaaaacctttctgactttgggtaggtaaagtttttttcagatggaacaaaataagcatgaaccataaaaggaaaaaagtgataagctggactttataaaaattaagaatattaacaactgctgttcttgaagagataatgctggccagacatggtagcccacacctgtaatcccagaactttgggaggctgaggtgggtggatcacctgaggtcagcagtttgagaccagcctggccaacatggtgaaaccccatctctactaaaaatacaaaaattagccaggcatggtggcatgaacctgtaatcccagctacttaggaggctgaggcagcagaattgcttcaacccaggaggcggaggttgcagtaagttgagatcatgcgcactccagcctgggcgacagagcgagactccatctcaaaaaaaaagagagagaaagggaaagagagataatgctaagaacagtgaaaagacaaacaacaaactgggagaaattattctcaatacttatatcagacaaaggacttgtatccggaatataaaaaagaagtcttaaaattgtaagaaaacaaacaattcaacttaaagcctgagcaaaagagctgaatagacactgcccaaaagaaaatatcggatcgccaataagcacatgaagaaatgcttggcaccatttggcaacaggaaaatgcaaattaaaaccacaattagataccactatacatccacctgaatggttaaaattaaaaaactattttaagcccaggaatttgggcctgcaatgagctgtgagcacaccactgcattctagcctgaacaacagagcaagaccctgtctccaaaaaaaaagaaaaagaaaaaaaaaaacattctggccggccacagtggctcatatctgtaatcccagcattctgggaggctgaggcaagaggattgcttgagcccaggaatctgagaccagcctaagcaacacagtgacacccagtctctacaaaaaataaaaaaacaaaactagtcaagagtggtcgtacacacctatatcccagctattcaggaggttgaggtggcaggatcacttgagcccaggaattcaaggctgcagtgagccatgactgtgccactgcactgacagcctgggcaacagagcaagatcctgtctcttaaaaaaaaaaaaaaagaatctgacactttacaatggttggcaaagatgtggagtaactagaactctcatgccctactggtgggaatgtaaaatggtacaatggttttgaaaaacagttggcagtttcttgtaaagttaaacacacacttctcatatgaccgagaaattctactcctaggtatttacccaaaagaaatgaaaacacatgtccacacaaagacctgtatgtggatgttcatagcagctttactcaaaacagccataaatgacagcatatccatacaatggaatactactcaggaataaaaagtaatgggctacccacacatgcaataaggacaagtctcaaaaacataacactgatcaaaaaaaagaagggtatccagtacactatatgattccacttagatgacgtttcagaaaaggccaatctaatcatctagtgatagacagtatatcagtgatctcctgaggctccaggcttaggggtggatgagcgcatgagaactgattaagaaaagtaacaaaggcagtggctcacgcctgtaatcctagcactttgggaggctgaggcgggcggatcacaaggtcaggagatcgagaccatcctggctaacacggtgaaactccacctctaccaaaaaaagacaaaaaattagccgggcgtggtggcaggtgcctgtagtcccagctactgagggagactgaggcagcagaatggcatgaacctcggaagcggagtttgcagtgagcctagatcgcgccactgcactccagcctgggcaacagagcgagactccatctcaaaaaaaagaaaggtaacaaaggaatctttcggaatactggaaatgttctgtgtcttgattgtaaaggtagttacatgtaaaacatttatcaaactgtacactaaaatgggtgcattttcttgaatataaatcataactaaataaagttgattttttaaaaaagcaaacagcaacaaacctatgcaacattaaacaatactaaggcccaggagactccatattcactaacgtccaaataacaccaatatctccacttctaaagagagtgaatgcttgaatctgtatctagtgcaaattcacagaagtgactactctatggtgggtaaacatattgcagcatctgctacagacagagtgcaattaagatcagaaacccatgttatactgtgtctcgccactttatttattgattggaggcagcgtcttgctttgttgcccaggctggagtgcaatgacgtgatcatagatcactgtaaccttgaactcctgggctcaagcaatcctcccacctcagactcccaaagtgctgggtttacaggtgtgggccacatcactttagagcggttccacccctgttacttgtcttatctgctaaatttacccagctaacaagattcagtgttgaattcaaaatatttcttatgatctccatgtatgttttggagcttcttttcccaagaaacaccaaataattgatcttaacccataaaggttttctatctcagagacacatttgcctcattgcaaataataagattagttgtgcttcagtcataacatcgtaagttgctaggcagccagaagtgagttaatcagaaaatgaatcatcaaagacatggtacgcaatctccttttatgggtgtctcattcttaaaacactttcaaggaagcagaagcaaatatttgtctactcgtatggaatttatatgacgcaatccaattcttactattggtatttgacacgcaaaatactcacacgcaatttcatgttcgcttggtgtcttcactcacaggacaaagccagatggcacagcaaatctttataatcaaaagatggcactcctgggccgggcgcagtggctaatgcctgtaatcccggcactttgggaggctgaggtgggtggatcacctgaggtcaggagtttgagaccagcctggccaacatggtgaaaccccatctctactaaaaaatacaaaaattagccaggcgtggtgatggacacctgtagtcccagctacgtgggaggctgaggcaagagaatcgcttgaactccggaggtggagggtgcagtgagcagagatcgcgccactgcactccagcatgggggacagggcaagactctgtatggaaaaaaaaaaaaatggcgctcctgaaataggactatttttttttcctgacttcatctaaggcagggattgatcatctgacaacccttggggtgggcgtttattcagcgtgccagtaccaagcaaagcaaggctccatgcaggtttgcgaaatgcctgtctgggtgtctgcgtgtgtgcacctcctcaccagcctggtcccttatgcggcagcttctgtctagccacactggtcccctgtggtctaaccaacccctgcctgacctgtccaggttccacgctgcacggcactgcaccctggcatgagttcccaaaactgctgcttcctgcttcccaccctgtgttctgccactagccccaagcaccggcacacaaaagcgaacggctctgaagggcttccaccttccagtggcttactttgctgaaaccagtccattttcacaaacatccaggctgaccgtcacttagggacaccctcgggccaaaatgaatctggagatgtggtttatttagcccacattttgaaccagctgcaacacttaaaaattgagatatttcatatcaaatttcctgcctcttttgaagcagcagcaactctttccacacagcagtaatgggctacagccaagtagccaccctcatcccgtggagaacgcgctccagctggccctgtgtgtccccagcagccagctgcactctgcgctgcctctcctgccccctcccctggcctctgggttagagaccactcgtctcagccccagcagcaagcctggaacccatccagccatccttctctggggccctgatgatgcgtccttccagttaggtccattttaactccccagactgagtctagtgacactgactctcagaacagaaggggactattttggtagttcctcaaaaagttaaacaagaggccaggcacagtggctcatgcccgtaatctcagcactttgggaggctgaggcgggcggatcacaaggtaaggagatcgagaccatcctggctaacacggtgaaaccccgtatctactaaaaatacaaaaaaaaaaattaaccgggtgttgtggcaggtgcctgtagtcccagctacttgggaggctgaggcaggagaatggtgtggactcgggaggcggagcttgcagtgagccgagatcgcgccactgcactccagcctgggcgatagagcgagactccgtctcaaaaaaaaaaaaaaaaaaaaaaaacattaaacagagagggccgggcgcggtggctctcacctgtactcccaacactttgggaggggccgaggtgggtggatcacctgaggtcagaagtttgagaccagcctgaccaacatggtgaaaccctgtctctaccaaaaatacaaaaattagccaggcgtggtggtgagcacctgtaatctcagctacttgggaggcggagacagaagaatcgcttgaacccaggaggcggaggctatagtgagccaagatcatgccattgcactccagcctgggcaacaagagcaaaactccgtctcaaaaaaaaaaaaaaaaaattaaacagagaattaatacatgatccagcaattccactcccaggtataaacccaaaagaactgacagcagggacccagatatgtgtgtgccaatgatcatggcagcattattcacaacagccaaggctggaaataacccaggtgtccctcaatagacaaatggataaacaaaatgtggcatatacaattaaggggatattattcagccaaaaaaaaaaaacaaggtatgaagttctgatacatgttataacatggatggaccttgaaaacattacactaagttaaataaaagccagacacaaaaggacaaatattgtatgatgtcacttgtatgaaatatccagaataggaaaattcataaaaatggaaagtagaacagaggttaccaggagccacagggagaggggaaggggaattatttattcactgttacagagtttctatttaggacgcttaaaaaaaaagttttggaaatatagagtgaaaatggttgtaaaatagtgtgggtgtaatttacaccactgaatcggagacttaaaggtggttctaacagtaaacttattttatatatattttatcacattaaagagagaaagggagagagagaaggagtcaggatctcagttcctttactctcacaaagctccctgtcctctatgcaattagccaccccccccaacccctgccatcaattagccctgcagaccagggggagcaaagggacagcttgcacaggcaaccgaggggtctcgctgtgctctcctctgggtccctccttgctgtccctgagtatcactaagagaggccactcaaaggacctctcagaacaaaagtcatttccaaggtgactttccacccacttctccagctaaatgattttaagttctgcttaggcacccacttagctacaacaagagtatgaaagccaccactttctgcacatccatccactgccaagcactgctgggtgctgtggacccaagatccccagtcctttccaggcgacacctctgcatcattagcaccgtccacagcagaagaaatgggaccccagacagcattaacgactgcccaaaccacacaggcagtataccgcagagctggaatttgaacccatgaaaccaaatctgtctggctcccaaatccttgctctaattcctatcccacggtcctcacaaagagacctacctaacccaaaatgcagcaaattaggaaatgcctattttctataatcaaaatgctgatggtatcacaaagatataaactcaatatgcaactatgaataaacataaaatggatgtgtatggctcagagctgggggtggggtaggagggagaagggcagtgggcaggggtgggagcagagtgtttgataagaaaaacttcaatttggcggggtgtggtggctcacgctgtaatcccagcaatttgggaggcccaggcaggcagatcacctgaggccaggagtttgagaccagcctggccaacatcgtgaaactccgtctctactaaaaatacaaaaattagcagggcatggtggtgggtgcctgtagtcccagctacttgggaagctgaggcagaagattcacttaaacccaggaagtgaaggttgcagtgagccgagatggtgggccactgcaacactccagcctgggcaacaaagactccatcttaaaaaaaaagaaacttgaatgtgaaccttgaagctaccacccactagctgtgcctacttagacaaggctgtgagaggacactttcacaaagaaataaaggttttatcatgtaagtgagctactgctgacctcacccctatctggtttctgcaggaaagaggtgtcatattcacaagggttctgtaatggaaggactgtgggcagaggtaagagaacccaagaacaaggaaggggtgccaaagcacttggaaccagcaagggactgaaggagcaagagggggagctgctaatgggaaataatattaataccttgacctctctcaaatcctgcccatcaatctcctgccagtgcagccagtgatgagaaacatccagagttaggagcacgggagcccagggatgggccgacaggtgaacggtccaggggccagcacatctggctgggtgggcttgctggttatgcgtcccctctcacatccagccctgcacaactctgacttagtcccagcaacaacatgaacttctacacagcctgatctagcgatgagcccaaatcgattcagcaactccaaaggacttaggattgatgtcattggctatctaacccccaggaatatgagttcctccagggctgaacttgccacagggctttctagatccccaatgcctgggacacagtaggcactcaataaatgtctgttaagcggtcttccttttataatgtaaagtgatagctcaggctcagacgctgaaaggcccaggatttactgcatttttttgttacctgccaactagcgaagaccacaaaaggcttgagtagaacagtaaaagcagggagtgaataagtcatttctaataaggctggttttataggcatcacacctccaccaagccaaacaggctcactgtagaagcggaatctattctgcaagtgcagagaccaaagagaaagccagggttggctctaacggcgagggcggctctatggggcagctcagccactgcctccacaatgagagacgcgaacttccactcactggtctcgtgggtgcgggaccgacacccacaggagtctctggggccttcattaagcctgcccaaggaaaacgcccgccatttgtctcagcccaacacaaacaggcttctgacagagcaggcagcgtgggggtggagggcatggaaaacgctggggctgagccctgggggcccataggcagccctgcctggtgcacccagaggtgcccatcctagccgacatgcacaccaacgtgaccattcacacgttcccttccttctgatgctgacatgtccccccgccccaccatcctcagctatttgcctgttacctgccagccccacctgggcttcttgtgggggcaggggactctggcatgggatcctgccctcagctctgccaccatcagctgtgaggccgcaagaggcactccctgggctgaccgcagcttcttcatttttctaacgagaaaacgagaacatctctctctggtaaaacggagcttcaagattcaatgtttagcctccactgtttaattctcagttgaaattttaacatcatgttatgttaaaatatatgttacctggaaagagagaagcggccccatatcaagaggccaagagctttctgctccaggaccttatcttagcaaaggttcactggtccaactggctgtcaccatgacacttgggaacattcagagaatcccagggaataacacctggccaggcctggcaggagagaggggagcggcgtccaacactgccctacgtgtgcaaggagagggcgggtctaaccccacacactcaaggccacggtctaagaagctccggctcagaaggtgcattcgttcataggagaaaagcagagtttctactgaaaagtgtttttaataacacacaaaacaattccaacttttccctgaaactccatctggccagtttcctccggcatgcccacagctgattcttctagaaactgtttaacatgattgttaagaataacctaacaacctgttaggttatttatcctgctttcccagaatacagagctggactgtgcgggcagccgctcgggcagagagggctgtgcactgccggcctgtccctggggtctctgggggctctcggtgcacaggagccaaggaagcagctcccaatccattagggggaaaaaccaaaacactttgcaagtgtccaaataaaatgtgcttactaaatgtctactataagcaaaatactgggaaagggatacaaagattaacaacatatggtccttgctttcaaatcagcttgcatgacagtttaatggggaaaacagatatttatacaaataatacaacaatagcacttatacaaaccacctaaaaaaaatcttatggaagtgactagatctaaggttccaagtcacgatacttgggttaggaaattgcaagaaaaaattcaaatcctatacccgtgacatgatcatcagtggaattttcctagatcagaggggtagaatccctttgttgagtataaaagatcaactatctgtcctcatagcatccggctgtaagatttttttatgttctgtaatttaagacttttcttttaagagatagggtcttgcttgctcaacatgttcctcaggctggagtgcagtggcgcgatcacaaactcaactcccgggctcaagagaacctctcatctcagcctcccaagtagctgggattataggtgcacaccatcatgcctagctaatttttttttttttttttttttttttttatcttttgtagaggtggagtctcgctgtgttgcccaacctggtcttcaacacctggactcaagcgatcctcccacctcagcctcccgaagtgctgagattacgggcatgagccgctgcacctgaccaatttaaaacttaaaatcttactactctaagaactttatacacatgtgctttataaatgctggttcatatgaagatggaatatccccctcaaccctgtagggtgatacacagccatacggaaccatcacaaactagtaggctactgcttttacttcaaataaaacaaatactccccgggccaagtagaaactagagccgttctcctggaagcaaagatgtcaaagcctctcactcttagaaacaacccacaatagggtctgggctttgtggtttacttaaaggaagtaacatttgcatcttcaaaacaaaaacaaaaggccctctttatcaggaaaatgtggcaaaaggttcaccagtggtaaatctgggtgaaggctccacagggcttatagggttggtgtatgactcttttaccttttcttcagttccaattttttttaacaaaaaattgggggagaaataaaggattttccccagaagcttgaaaggccctgccagctcctacatgatctgtagatttttgttctgctgttaatcgtggaatcatcaaagaaacagccttcataaagaatcaaaaagcaaaacagcaatgaagaacaccttttagcttttgatctgaacaagccttcatgctgcctttgccggggaagggctgctgaaccattctgaggcaagaacacctccctgaaaaaccacagatttccatcctcatggagccatccctccacagacccagatcttgtacagcccaaatgcagggcgcactttccccgagtacaaaccccagtgcgtttcatgaagctgttcagtatatgcagaatcagtgcattaataacagcttattggcaccgaatgaaaaacacacaagtcttaatcttaggtcttgaattttgtccagttcctacgtcatacctggctgtaagggctacagccgtaagcatgcttggtgactggaggctgtgtagtgagacctgagttttgaaaccaggattggtagcttaacaaaatttactggttgtagaaaaagtaaacttgcctccggggaggtgagctcagcctcaccattctgacagcagcctctggtggccagtttagtaaaaagtgttggctctcatgctgaaagctcggaccttcccttcttaatgaaggtcgctgcaagcagacaggccattctaggtaacagctggaggtgactggggaagctgcagaaatccaaacgaaggtgtgactttggaccacgtaaatcaccaagtcattggatgatctgtctcttgcattaaaaaaaaaaaaaaatgaagtactctctttcaaaagtagaaaaataaataaagagaactgttttaaaagggctcaagtcacaaggcagataatacatactcagtttgaaagtaatctcattccttacttgcatagaaagcctttaaatattcaaggagcacagattcctgaacaaaataaagcccagcctgtctgctttcttacatagcaccccatggtacactaactcctatgtactgagtgccggaaattcttcctgcaaagtaaggaattgctccatatggcagaaacttctagaaaatgctgcaaccattcattcagagaacaaaattaaatattcaggattgtaggtgaggcctgatttctagtgccacagattcacaccatttcactggatataaatagaggaatgatcagaggctgacagttggcttcaaaggcagagagggtaagaaggagacgccatcagcttcaagccaacttcttcgtaaggtgcactctgtcctcagctgtcagagaacaatctggaaacaatctgctgagcagctgctctcatcaacaaactgtttattgtaagaaagtggctgggtcaaaggctaaacatcaacccgagctgaaagcatacagaacaaaaatcaataccgtccctgctaaagagacccaggacttagcatgcagaaaagagagggtgaggaactcatgtttagttctgaaagagtaagagttggaacaaaacccccatatttcaacattcagggttcttctgcatattattccaattggcgacttgctgctatttgcagaatggccttgtaatgggggctaaaatgtggcattcaacaaggacacagaaatcaactttgccctaaaagttacaggggttaacatcagttgtttctctctcacatttgttttgcaacaggaccaacgtgctcatcatacacatgtgcttattatacacaatgcacagatactacagtccatctttaaatatgtctaattggaaactggaaggctgactggacatgagattatatgaagagattgtttcattttaggtatgacggtggaattgtgattatgtttttaaacagagctcgcatctttcagagacacatactaaaatatttgcagatgagaaaactgaaacagtatctgggaattccttccaaataatactggcagagaagtgggtagaaagaagtgaaataagattggccataaatggataactgtgaaagagagtgatgagtacagaagaattcactcattatttatatttacttttgcatatttgaaattttctatgaaatgtttgcttttacttgtgtgtaaagttcaacagttactttgaaagaaaaaaagttttcttaaatataagagaagtattaacctaccgaggcaaattaattaagtcatatgccatggtattgctaggtatccaatttaacgtttttgagcaatgtccgagatatggttgttatgtcctgagttgaacgatggagaagtagaaagagatgctcaaagtgttcccactgcatacgtgctccagcaagccagaatgtgacacagaaacagataagacggtttcccatggtttaattgcagtatggggcaagaggacatacgtgagatgctaggaaaacccaactgtcataaataatggggaccaaattgttaaaagacaagttagcacacaaattttgaaaacacaatttctttgtaaatctgaggctgctatatagtgtattgataattcttaaattaacagtaaaattagagaattagcctgaaataaataaaaataaagcagatagcaaaacattatttcattgtgctgaaattaactgtgaagatgtatctatgattttaacttgttccaatataaagatgaaaatggtaataatcacaaattcttagaaaagaatgcattcaaaggaactgcttaaaaagttaaaaaaaattttttttagtctacttgctttgccaagaccagcataaatactgcagagagtcctgcaaaggatgagaaaggtcatcttgtctaccctccctcccaacagaacagagaagggtttggtcatgagaatttggtgacgcaccaggcacggtagctcatacctgtgaggccaagtactttgggaagctgaggcggaagaattgtctgagcccagaaatttgagaccagtttgggcaaaaagtaagactccatctctacaaaacacaaaagtaaaatagccaggtatggcgatatgtgcctgtagtccccgctgcttgggaggctgaggtgggagattacctgagctcaggagttcaaggctgcagtgagccatgatcatgccactgcactccaacctgagtgacagaacgagaccctgtctcaagaaaaaagaaaaaaaaaaaaagacacccaccctagtgggaaggtggggcagagatgggaatggttaatggatgcaaaaaataaaaataaataaaaagaacgaataagacctagtatttgatagcacaacagggtgactacagttaataataatttaactgtacatgctcaaataactaaaataatataatttgtttgtaatataaaggataaatgcttgagaagataggtaccccattttatatgatgtgattattatgcacagcacgcctgtatcaaagcatctcatgcatcccataaatgtatacacctactatgtacctattaaattaaaattaaaaaaaatttttaaagccgtctaccaagaaaaactcatttggccaatctgagacactacacctaaccccaacatcacagaaggaaaaaatacacagagcaaaaccttcaaaattatagacctttgacctttaaagcattttattaactaaaaagctacagaaaaacttaaatcctgaaatgcatcaaggttgcctatgaaaagtaatctagacaatcctaggcagagtctggctatccccccacccccaaattaaccatcattttttaatttatgaaactactgtttgatgtttcttttaaaaggtgtattttcttatttacggaaattaaaaacaggaagagggatcagtggtgccatcattcaatcactcttcagtgaactactctacgtaggattcatttttgttcagagaagagagcaacttaccaaatgtttacctagggcatacaaaagcaaactcagtaagttttctgagaagaatattcactttcagccgggcacagtggctcacgcctgtaatcccagcactttggggagccgaggcaggcggatcacaaggtcaggagtccaagaccagcctgaccaacatggtgaaaccccgtctctactaaaaatacaaaaactagctgggcgtggtggtgtgtgcctataattccagctactcaggaggctgaggcaggagaatcgcttgaacccgggaggtggaggttgcagtgagccgagatcgtgccactgcactccagcctgggtaagagtgagactctgtctcaaagaaaaagaaaaaagaatattcactttcaactttaattttaattttctaaacttttccttaatgcatgtaggaggcaggttgaattaaactaaaagtttttatagaccagtggctcaggaaagcctcatggtgggtgaaactgacaatggtcctatgatacgcatgttcaggacccagcgatctagctgactgctgatgggcaacgctgttctcctttcgctcacacctagaatctgaatctcagcctcggaggcgcagcagcacagtgccaaagcagccctcctcttcacccagagcccctgtcccctgcactcagacacacatgccagagacccaccagagacacaaacacctacacaacaaaattgtgctgtgaacctcgtgtcaagggaaagtgcatttcccttttaccagaaatctccagacccgctactctaagtcttctctcactctctgggagaaatgaccactccacaaaggcacgttctatctcagcaatcttaagtttttctgtagttctggttaaaacagacatatgcacttaaataaataaatatataaatgtatatgcatatatattatcataatatgtattcatatggttgaaattttaaaaactcaaatacccttaaaagtatcgattaaaagactctgtttttttaaattaaagccacgttcctcaattcacgaaataaaatttgagttatagaatttttttgtaaaggacagtagctccaatgatcaatgagaattgaaatcatagtctttaactccaatatctcctttttagaaaaaaatatttattttaattgacaagtaaaaagtatgtacatttctggtataccacatgatgctttgatatatgtgtatgttacggaacagaaactccaatattccttccactgattctattattaaaccaaagcctaaaaacattttaagaaagaaaagacccacgacaccagcagagggataatgtagaattgtactggaaacatggtagtacctggatagctgtgtggccaaactcggcatgctgtacctggggagacgcagccatacacaggcagctacaacaaaacaaacaaattaggaagatctctcagaaaaaaggagtcttcccttcttatctccaggagaaagtgcctgagggaccgacagacggactaaccttggctgagtcttcctgctttcacgaggaagcccgcaaaatcctcctggtgctgcccagcatcggccgagctccagcacaggagcgctctccttgcaccccaagttgtttctccccttaccactcaggtgggggaaatgggggattaaacaccactcaggtccacaaactgcctgtcagttttgaaacccccgaaacactataaacatttttccaagacagtcagtgcaaatctccaggcggcattctcaaatcattagcatgcatggaaacaaaatgtgctccccagctataattcacatcccaagaactgaaggagaacatttatcaaatgggattcgggtctcagaccccgacattcctgagctgacaccaccagctccgcggcccgggagcgccagactcaacggttccgtcatcgccgggcgccccaccgccgcacccaccgccagctctggtccttggccctgcacctgaccacaggagccctttgatcatgctctctaacccggcaccagtatgggcttattcctgggatgtgttttttgaactgggagacaaaaatccgcgtgtgagaatgttctaagcccttctggagacagcctccaccgacttccctgggaggtgaggccagaatccatacccgctcacacatggcagctattaggaagcccgggtaggagacaaaaagcatgtggtcttggaggattttttttattccaaaagaggccgtttcccatccacaagtttgtgactgcataaacggtggatataaatagacggaggaaagaaaaccacgcttcttagacgggatgctatcccaagaaggaaagtgctgagcgggaatgttccctcggcctcagagaccttatcaccccttcaccaggccagacagcaaagaccgcaacgcacagaagccagaatcatcacaaaactaattaaacgtggaaaacaacaaaagcgtttgtgcagatttcccacaagcacacatctctgccccgggtatttactctgcaggcgctgctttgaggcacacttgtggaaacaagattcaagtaaaaagacaggacacacagtagctgaaaagccttcttcccacaaaaataaaacattctaaagggagcacaggaaaaccccccaagtatgatttcttttgcaattcaacatcaaaacccatcatgtcaccttttgccatgggtattatgtttgataacaggaagtcagtcaaaatgaacaaaaaatttccagcgtaggtgaagggcgaaggaagaaagaaacgagagaaagaggtatatgaaagacccttaaaagcattcatagctataaaagcttttaaatgtttgctttaatctgctagctgcctttagccggtgccgtattgtaaaacagccgcacaagaccacagcagccacatgtcaaaagctattcaaggtgcacctggaattctgacttcctctctaatttggatctctaaaaattatttttaagctgtattttaaagttatgcccaaagcttcgccctatctatacattcgagactcagaactaggattaaaaataggagaaggggaggactccacatcaagtactatgttaaaaaatggcaggcaaagattttttttagtggagaattctaattaactcattagaaaaatacattaagccaggtgcagtggctcatgcctgtaatcccagcactttgcggggctgaggcaggtggatgacctgaggtcaggagtttgagaccagcctgactaacatggtgaaaccctgtctctactaaaaatacaaaaattagccaggcatggtgatgggcacctgtaaccccagctacttgggaggctgaggcaggagaatcgcttgaacccaggaagcagaggctgcagtgagcagagattgcaccactgcactccagcctaggcgacaagagcaagactccatctcaaaaagaaaaacaacagaaacgaaaaatacataagcctcttcactgtcctgtacgccagcttcctctcccgggggcaaggactccttccccgccctgccctacttatcagggtcactatgagacccaaatgagatggcgacacaggtaaaaaagcttggttaactagaacgcatgccacaaagacgaggaattatccctcgttttccagaaacttctgcagcaagggcttgtacttagtaggcacacagatgtttgctacatgaaggggccagttagagaaggaggaacaactgtgtggtatgtatgactgagtctaagtttcttcataaagctatcaacgtctgaaaagcagctccatctcagtatgttcatgtatatcaaatcatcatgctgcataccttaaatatatacaatttaaaaaaaagtaacataaaggacttcccggagtagaagggcctgtacccgttttttgatatgtttacaagtatctaaactatccttaccaacaaaacctgctttttatggggggaaaaagtttcacagtaaaaatttggggttaaatcaaaatgaaatgtcataactagtttctgtttttaagtacgtattacccattccataactccccactaccaaaatcacacaaacacacctcatggtgattttgcccgatcatttcagtaacaaacccagttgtcacttcttgtgacagctacatcttgatcccagctggacacaggacccctgctaagagtccagccggcttgtgtttctcaggtcacctacacactgttagccaccgttggccacgatgaacacccacaaggttcccaagctttttcattttggaaaaattcttgtgctccccagatcctaagcagatgtcccaggctacgggagcaatgcacaagctctctagttccccaaggtaaaggtgccgaccttcctgggggcagcacgtccagttccccaaggtaaaggtgccgaccttcctaggggtggcacatcccaccttcttctgcttcctctggactcactggggggaccaaaaggggtccactggcaggcaactctgcaggggtggagggtggggggctggctctgccccacacacagattcaggtcccagccggtcctaacccgccagctgcccctcccagtgagaccctgcagagcgtggcagcctgtgctttctttctgccattgctctggcagagataaaaaggaaaatggaacccagagaaacagaaacaaggcagctagcttctcaactgggaaagaattacattttctctagaacatcagattcgatagaaaataaaatctattaaaatgtttctataaaatataaaagaattatgttttttctggtgttctgtaagggaaaggattatgtttcttctataaaatcagtgtttctcaaaaacattcatgtcccagcacagtaaagatgtattgctgctgactgcctgtcacccactggtggcgggaagatgtggtggccaccaggtgatcgcaccccggacaccccacagtgagccatgtggtgtatcagtctctcacccaccaacatctgcagagaggaagccatggagaggtccccatatatatggtcttggagaaacagttcaaagggctctgccaagaaactggaacatccaagcaggggtagggcacccaggggtaccttccacccacagaagcaaagggacagcttcagctcggaggcccccacacaccaactcagagctcacagttaaccctggaagtcacagctgccacaggccatgaacaagagtcacgtgttttactatcagagcgaaccctttctaaataatatgtcaaatattaatattaaccaaagtatcaacacctatgagattccctgccttttaacattcaagtgtgaccatgtgtgagatgccttcaaagtccaatgacacgcagtcatttgtttttagtttttaataactaatttggctcattataaaataactcataacaaataaccaatttggctcattataaaataactaataactaatttggcttattatatatataatcattatagaaaatttggaaaatacagagaaagttttaaaagattattaaaatcacccttaagcactccaccacaaataagtcccatatataccagatttccttccagtcttgtttcctttttttttttttttttttgagacagggtctcactctgttgcccaggctggagtgcagtggcacaatcatagctcactacagcctcaacctccctggctcaggcaatcctcctgcctcagcctcccgagtagctaggactacaggtatgcgccaccatgcctggctaatttttgtatcttctgtaaagaatacgaaattctgccaggttgcccaggctggtctcgaattcctgggcttgagcgatccacctgcctcagcctcccaaggcattgggattacaggcttgagccactgcacctggcccagtcttctttctacggagataggtgtgtggtaaacgtgtgtttgtgtgtttgttttatggtttaactttttgtcattttgctgagacccaaatttcaatcctgctcctgggaggttcaattaaacgtgaaagccttggtcggaggaagcccagctcagccgcccacagcctgcatctcagccaagccctgcttcctcttggtatcgtgcacagtgacactgatggagccacacatgactgggttttatagtgggaatcacacgctaccatggtgtctgggtgtcgatgaaggtctccgagcacatccttcccaaatgccaagggctgaccgtcgctgaggcgagtgttttttctctttgggtcttgctactattctttccagttatatcacagtaacggagaagcacataaatcttctgcgctattcgtcataaagagcaagtgtcaaggcaccaaactgtgtaaacacagctggtacgcagtaaaactatttagataactagcatatttattttgttctttcatatcccatactataatagtacctaggacacagtaaacgttgaatgaaagatgaatattattaactgggacattgaaataatttctgcagacccaaaagaaagtgccaccaatataatggaaaactataaaattatactatgtgaaactgatatagacagaaaaaaattaaatctctgaagaacaactttatagttctagggtcctgtatgcgaggcagcctagctcagcagcgacaccctgtggtgagagatctttgactcccagcaacagagtgtcttgcagggcacaggaagcagaaagccagcccaggcatccaatccctaaggcaggcgatgagccaaatggacaggcaggatttagcagatgactgggtgccaagatcctctccatggaacttaattccgtgaggatgactgagatctgttaagtagggatgccagaaagaaaaccaaatacaaagcacaaacccaattccattcccagtctctgtggtccagatctataaatactgacccatagcacagtgactagatgcaggaggaattcagctgcctccggaaagaccacctcaggcagtgcatatccaccttcaaattcatttgcactataatcctttagagaacttgtattccaagaaaacatcatataaaaccttgacttctgccatttccttctacagcagattcaaggacacctaagcagagttaataaacattaagaggccgggagcgccatgcctgtaatcccaacactttggaaagccaaggcaggcagattgcttgaactcgggagttcaagaccagcctgggcaacatggcgaaaccctgtctctacaaaaagtattaaaaattagccaggcatggtgatgcacacctgtagtcccagctactcggggggctgaggtgggaggatcgcttgagcttgggaggtggaggctgcagtgagccatgattgcaccactacactccagcctgggcaacagagcaagaccctgcctcaaaaactaaaaataaacattaagaaatgaggatatgtacaacatacacgtactcattccattccttgggctcccaaagtaaagcagaattcagtcagaaataagcagctgagaggaaagtagtccacagcacagatatccaagaaaatcaacaaggccaagtggagggcccgcaatgggaagtgaacatttctgaaaataattattttccaaagttattatgtaataaggggcttagtagggagtgtccatgtatgtgtatacagagcaaatatttgctttaatcatgttcaagcatttcattcccaaagtttgtgaaaggggaaatcaatactccctcaattgatcaatgaacaggtgaaaaagtatcacctcccactgccccaggctgtttaaaaaactggaaggacaaaaatgtgaagcatctgttgtgtgcttgaatataagcagacacatgatacaaagccctgacatgggtatttcaggttatactcatcctaaatacaccagaaatgccaagagttccaaacttccactcacaagagaataacctggggcagggccactcttcctatccactactctgtccaagagtccggaggtcaagtccgaagaccagcatgatcagaactccgagaaagggcagggagctctgccaagggcaaggccaggccacctcactcccggacttccccagctgggagcctcagagcaggcactggctaaggtagccagccccagccctccatccccaggaaaaggcgacagagaaggtctaggggactggcagtgctctcagattttctatctgtcttctccaagtgagcccatcacacccagatagctcatagctctgctctcctccaaaaactaagggacacagtgtaacacaaaagaaagtgcctcctttttaaaaaatgttgggatgagaggtataatttgtttgtttcaagagaaagtaggtaagtttagtgtttaaagtcacctagactattgggtgtttgcagaaactacatggttatgtcattcaactcacaaatttgtctgttcagagaagacaacagaaatagacaaaataatttgtcacaatgactatgaaactgatagtatggccaagcagggggattagcaagaacctacacctggagaatctggcgacctgcccaaaaccaggtatcaatcacaggcagcaagtgcaggcatgggccaagagaattcccgaacacattcccagctccgtgggcattttcctgtcagacacgactcacagacgtgaaacccagagcgctgttgccacaagatggcagacattagcacaaatgtgattgttccaaagatttgctgaaagtggctcaagtcaaaacaaatgttttcaatcccaaatgaataaagttacagtctgaatatactcttgacacagggaccctcttccccctaacgtggaaagggccacacctgcagacttaacacctttctaaactctactagttggccctctcttatatataatcctcccccaacaaaatgaatatttgcacatcttgaagatgatttccaaacccgaagtcaaaacagaaatggaaaatcaaaaccaaccaaaataaaacaattaaagcaacgggtcgccactgtgaagagggccacgtcacagcgcgctctgcccagctgagcccacaactcacctccgcagctgacagcaagtaaagaggagttaaggcaggaacttgtttcatgtcacagctgaggccaagggttgtcagaatctctctaaggacttcgtatcttctaaaattgcttgacttgagcaagttaaaatcttctggagtttgcactatgttggagctgggaggtagttctaagtgcacctgaaggggaaagatagcactatgtaaactgagggcactcacaggcaatgagaaaaacagtttcttttttctttttctttttttttttaaatttagagacaggatctcattatgttgcccaggctggtcttgaactcctgggctcaaacgatcctcccacctcagcctcccaaagtgctgggattacatgtatgagccaccacatctggccaaaaaatttctttaccagttttcttctccaagtgagcacatcacacccagatagctcatagctttgctctcctctgaaaattaagggacacagtataacccacaagagaaaacttgaacatgaatttttctaattatcaatagcatataaactctgaagctgtatatctggaaagtcatggccaacaaaagaacgattccaaagagcctactcaaattttggttgtcaggctgagaggccacggtggaaatgaccctggacagtcatcatctctctccaggtactgatgttccacactcatcagtcatatgaccttccgcaagttacttaacttgattataggaacaaaatatctagggccgggagcggtggctcacgcctgtaatcccagcactttgggaagccaaggcgggcagatcacctgaggtcgggagttcaagaccagcctgaccaacatggagaaaccctgtctctactaaaaatacaaaattagccaggcgtggttgcatgagcctgtaatcccagctactcgggaagttgaggcaggagaatcgcttgaacccaggaggcggaagttgcggtgagctgagatagctccattgcactccaacctgggcaacaagagtgaaactccatcgcaaaaaaaaaaaaaaaaaaaaaaaaagacctagaaagacagttatgctgaaaacctaattgctagtgagttcagggaggcaaatgggtcatgctggaaacttccattttgcctattagccataactggaaaacaatacctaggaagagagcagcgttattcatcattttaagagcgtttgcaggaggctgggtataaaggctcacacctgtaatcccaacactttggaagaccaagatgggaggattgcttgagcctaggagtttcagaccagcctggacaacatagtgaaaccctgtctctacaaaaaatacaaaaattagccaggcgtgggtggtgcggctgtagtcccaactacttgggaggctgagctgggaggatcccttgaacccaggaggttgaggctgcagtcagccatgatcgtgccactgcactccagcctgggcaacaaagtgcgaccatttaaaaagaaaaaaaaaagagagagagagtttgcaggaattcaaaacagcaggtccttgaataatgttgtttcactcaaagtcattttgttatgatgttgatgaggggaaaaagaaatcacttcccagccggggccactgtctgtgggtccgtacgctctccccatgtctgcacgggttttctctgtttctccgttttccccccacatccccaagctgtgcacattaggtgaaccgatgcgtctacatggtcctgatctgagcaagtgtgagtacgggtgtgagtgtgccctgtgatgggagggcatcctggccagggctgactcccccaccagtagtaccctgagcttcctggatgagttccagccacgcggccacccaccatgctgaactgaaataatcaggtaaataattatctttgtttttattaatctttcttaaatgtacatataattcatatttatttcagtgtttcagtgttttggcctttatttagaagtctggtgatgtctttgtgaccagaaatacactatgggaactgacttcttgtttatatcaattagcctatggtaacattggtttcattgtttgtcatttcacttaagggtgcagtttccaagaatctatcaacaactttaagtgaggacttactgaggaaggcatacgatttcttggacaccagaaaggcctttcctcccaccctccttcccctgattgaattttaagatttggaacttcacctagttacttcaggctttgttgtctagttaaaattaaaatatctccacctatcagcagcctttgtctgggtatgaaggaacttactggaacctctagctcccctgagatcagattttaaatgagcattgaagcctggaggttgccagaacactgagtacccagaaaagcaaactgagctcgtctgccttattttgtttcagctttgcctactgtatgcaaagcttctagcctgatattatagaagtattatgaaaataaaaagcataatgccagctttcaggcgacttagaatctctcaattcctaccttaaccaagccaaatatactaaccaaatgttagaagttgaggcttagctgggtgtggtggctcacgcctataatcccagcactttggcaggccgaggcgggaggatcatttgaggccaggagtttgagaccagcctggacaacatggtgaaaccccactgccactaaaaatacaaaaatcagccaggcatggtggcgcacgcctgtaatcccagttacttgagaggctgaggcacaagaatcacttgaacctgggaggcagaggttgcagtgagctgagatggtgccagtgcactccagcctgggtgacagagtgagactccggctcaaaaaaataaaggttgaggccaatcagaaaaggtctgcagggcaccgtccaacatggtccccaaaccacagctgattggctgcaggctggctgcttcctccaagactgaggatgccaatcatgggacaacaggtcaggtgggcctgtttgtagacagccctggagaggggaagaggcagaaaagcaaaaccctctaaagaatccatatcctcacctgatgtcaggagttcgaaaccagcctgaccaacatggtgaaaccgtctctactaaaaatacaaaaaaaattagccgggcctgatagcgcatgcttgtaatcccagttacttgggaggctgaggcaggagaatcacttgaacccgggaagcagaggttgcagtgagccgagatcgtaccactgcactccatcctaggcagtaagaatgaaactccgtctcaaaaaaaaaaaaaaaaaaaaacaatctgtatcctactcagtgcacttctaccctaaatgtgtacctctcctctccggtggacaaagccatgccagtatagacaaacagcatagcggcgagacccgtttaattcacttgagcacacggctatcccggagattaacccttacaggtggcagaaatgaaataagtcaagttctgttcccactagagccgaagggatgagaggggtgctcgactgaatgcatgtggactcactggtcagggtgaatacacagagtagccaagatgcacacgcagtgaattgtatgaactcgttttcacatgagaacgatgccaggacggaaaacaggatggcgctacaagcgggcggagttcctggagacaagggggaagatggccgctgaaaccccgagaactgcttggcttcactgtcttagggtttcaagatgtaggtgcttctacaatggaaacaagaaaagaggccacctctggttctacgctcccaattagcagggagaaatggcacaccggagtgtgtgggtggtagatttgtactcctcgtccacagaggtactggactagaatctcattctctgagtgtaaccctgttaccataatgacaggtctatttctgtaacttggcttcttgtaaaaataagactttttagttggaccgaaaaccggaactaaaaaaatgtctccagccacaaatgcgtggagagggtgatactggcatccagtggggagagaccagggatgctattccgcagccgaaaatgcacaagactgttgttgccacgaagaattctctgacccaaaatgtcaatagtgccatggttgagaaactctgtcatcaaaggcgacccactgctgccatgtgctaagctaaacaagaaaacaaaatcttttaaaatcccttttaaagattttctgtggacaacttcatggcaaattcctggtccatttgacagtcaaatgtcagcattaatccacagccttaagttttccctgcaaacttgatcagtacagcgagcatacaaacatttcctctctttctttattattatgaatggcaaaggcatcaaatctgcagcttactcggctgggacaccagtgcctagggtgcagctgtgttctgcccttgaaatactttacctcctcttattgggttacatcattactagatttattacaaaggtgaagactatgaaattgaacagggaaagaggaaactaaccagcctgtgataatatttattttttgatctcagtaaggtatcacagagacacaggcctgtggagaaaacagtgaccctgtcacacagaagactggaagtcatttaaaatcaaaaatgacattctaatcctctgaatctgatttgtgaagctgcatcatattgccttttttttctagggcaatgcactgcagtatcaaattttatgatagtaatggggtcaatttaaatggtgcagcaagcagatttgctatgtaactcggagaaatggatcacaacagtgccaaatcaattttctagtacaagtctgtgctcaggggtggtaaaattcactcttcaaaactgaaatatggctctaggaagtcgggtttttaagtggattttctgagaatatgcagttactatagttacaatatttgcagagaaaaagataagaggaacatttattacgcctccaaaagctaattcatgtggcctgcagcactgcaggaaacctgcttgggctgtacgtgttcatctgtcctaatgtccaaattccttaattttaagcatctctgcttgagtattatcttaagaacaagtgagtcggctttagaatagtaaagaaacaaatatatactctggaaaaaaatgtttggccagaaaattcaagaaacttagcttccaggagaactggaaaaagacaaggcattacaaaatgaaaacaaaacaaaaaaggaaacaattctctatctcaataaaaagatccctataataaaacaaaatcgattacacttatcttgggaactcttctggacaaaatatctacatctgcgtagttttctcattagagcatcaaatcctttagggcaagtgaatgttcatctaactctaatgaaaaccttttcccctaaggattaaaagatttggagtcaatgacaaggaattctgaaatagtttatccgctaccgtttgcttaaacaaacaaaaagctaaaaggaaaaagaagatgagccaaaggatctcctacgcaagaaaaagaaactagcattttcctttcatcctctttccattttccccctacctatgtattagtatgccacaaatctaagtagcttcaatattctcttatttgaagtttttcttttcagcacttggaagagtgacaaaacataagaaaggaattgggaacctgaagatgttttcaacaccaactaccttggcaatcaactgcagtatttcatcgcagtggtcactgacgtctagaatcactaccctgatggtttcaacttcctaccttaaataaagactcaattatattaaccaaggggtgctctaaggcaagaaagcagaccgatgaatttgagaaagatcattactagtaaagaacaaaacgagaattttctgactaagcctcagttaaccagcaagctcatttaaccctgacagctgccttgttcctccctcacaagtcttttggttaaccagggtattcaagaaagccctgaactaaactaaactttctgctcactatcagcaaaagctcccagccaatagtcaaaaacagcccgcagcacacgaactcctgaaacttttaagcgtgtacctttaaaagacatattccctcgcaaaaatacccacagatacccaaagatcaccaaatccatgctgccctgagtacctggcaaagaacagcttctcccccgcgagttccaaaaggcacatgcacaatcatcctgtccttgtcctcattctccaggtggccctggagcctgccggggctgagccggacggggccttcctggtacctgcagccactgctcaagacgctgagcttcacctcgctctggtcagccttggagaaaaccaagttctggactgtcttgtgcagtgcacccttgcttgtcacctgaaagccaccaaaggtgaaggatgaagacaggcccaacaccttccctccctgagaaagataggccatgaacttctggtacaggtcttcgggaatggactccctggtagcaatgaccaacagcagacagttgtccgtccacgggtctctgagagcactgtcctccagcaggtggtagagaatataactgtcaatgtccacacagtcggccagcacagaccggacctcgtggaaccggccgagggcttcctgggagtcggagcccacatagaggaggatgttgggtgcctttcccgtgaggttgactctcctcccttctctttcgggggaggtctcatcagcaacactctccaaactgctgctataatcgtagggaaggtctggaatgttctcggcagacgcaaacttgactgactcaatggtgctgttctcaagttccagacactcgtggcaactagacagatggaggtgataatgctcaacggggccccctcccctgtcactgtccccagcaggctcactcccagaggcactgcctctcctttgtttgggttcttcaccaagagcctttgggtcatctctgccaacatgctccataccgtcctgctcaggcttaatctcaagagaaggttcaggcttcggctctaggatctgggcttgcttgtttgagacctgatccttaacttccttcagagtggagtcctgcaagtgcaccgctaaggcatgaataggagagagagacagaaaattaatcaacacttcttgtatgacacatagctcatctcaagaatctcatcaccctctctgcattctgggacttacattccaggacagcctctggcacggctcccacctgcatcccccctcaactcgggggcatcctttggaaacactaattgttcccacctgaagaccccaagtgaaatcagcagtttgcccaacatcttttatacctattggagaacctaagaccctcttacggaatggtgaagaaagtgagattcagagaggtgcctttgcctccttacttacagattctatttcttgggtgttattctccttcacaataatgaaactgagcaataaaaaggacacatatctagagtctaccccagcacgccccagtgaaatgtcactctcaagacatgccataggatcaatgggagaagattcttcccagtatcttgtctcaggactggaacataagttgacaatcactaattcaaaaacatttattgagcacttgctacatgtcggacatggtattagagacatgtacgaggtgattctggatattaagggatttacataaacttccaaagctgataagggacatttatttgcccatcagatgaaagaagacattcatagacataaaaagcctgcttttaagtctaattaaggaagaacagtttgtgtgtttcctgaaaaacgatttgtcccaagaaattgtgatacatatattttaagtaaaaagcggtttgatttagaacttcatagtaacactagctatgcttcccactcaatcagaactgtagtctagacactagttatactgtattaaactatgtgaaataaatattatatgggttctgaatttgaatgccacctcatgagcaatgcagtcatgaaaacttcttgtttaagaaatttaataagcactgaaaatgtaccctgcagccccccaaaaaaatcttgacacatgcatgaattgtatattattacagtaaaatcaaacctgtggactgaattaaactgaaaccaagcatagcctttatgtcataccagtaagagtgctcaacagtccttaagctaataacttatagtgtcccactatgataaaaacagggtctcactttgtcacccacatgggaatgcagtggcgtgatcatggctcactgtggcctcaacctcccagctcaagtgatcctcccatctcagcctcccaagtagccgggaccacaggcatgcaccaccacacccagctaatttttttgtttgtttgtttttttggagataggggtctatgctgctcaggctggtctcgaactcctgggctccaagcgatcctcctgcctcggccttccaaagtgctgggattacaggcatgagccactatgcctggccaataaaaacattttctaaagttacttacacacaatcttttggggtaccagtccattatccatgtggagtctatcttccatgaacgccacccccagcttgctgaagttgtccacacttgcttcagcaattagccgataaggatccccaggtctgcaagctaatggcaaacaacagtctgaccacttgacaatctgagaaaaagcaggagagggaggaggtgggaaaagacaggttgagatttttcttctctaaaataaccacatactttatttttcccttgaggctcctaccactaaattacagtcattaataacaaattactggatattacattttactaatatcagagttgttttgaattcagcattctcatctctacctgacaacagtgcttacgaaacactaaatataactctctcatttaaaagtaactgaagtctccacctttttaaggaattaaaagataaagggacattccccagacactggaaaaacaccatgctgccctttaaaaacagagaagaggagagaacaagaagtccacaatacccagttactttcaatgtaacctgtggacccgcttttctcaaagtgtggtccgagaccaagtgcaactgacctcccagggagcacatgagaccttcagagtcccgagcacaactccctccctatctggtgcactggactttctggagttgaagtccaggaatcaggatttaaaacatgcttcccctggggttcctgcactcgaactgtgagaacaatccaaaaagactctccagacagttcctccctgtaaggaggttcacgttcctaccacaagggggacagggagaaagagagcaggcaaaacacccggcttagccttccagttcttactacagaagaccgtgacactggggcctggaacacccatgctctctctgagggttcccatggagaagacagcctgtgaggtgaagagcccggcgctgcagtcaggggtctgaggccgagtcaaaggcaactaatcatcactgtctgtcctcgggcaagcttccgaccctcacagcatcctaatttgtaaaacaagaatactctactaaaaatacaaaaattagccgggcgtggtgtcgcacacctgtagtcccagctactcggggggctgaggcaggagaatcgcttgaacccaagaggcagaggttgcagtgagctgagatcgtgccactgcactccagcctgggtgacagagcaagactccatctcaaaaacataaataaataaatataatttaaaggttggttgtgttcatgagatcaaagagtatacgtaatgcccccagtaaaaagcttagattgactggaataaagtactcaattaccgacagctgcttttattagctgtcacaaatgtggctttaaaagcagcagtgagcagcacagtctttttctaagatgccatgaacgattgctctacttcctaaagataccttctcagggacacactgccccgaatttcataattatagataaataattttttattccatttttatttatttgtatttatttattttttgagatgagtactcgctctatcacccaggctggtcttgaactcctggccttgagtaattctcccgcctcagcctcccgagtagctgggacaacaggctcgggccaccacactgggcttgaattctattttagatattggtgggctaggattttagaactaactcctcctaaaaactattttttaaatgctagataaaataaatgaataaagcattaccttaaaagtctggaagaacagactagataatagtgaacttccaggccaagtgtgggataaatcctgaacctacagaggaaaggggtattcctgcaagacacgccacttctgcccccagggtccttgctcatccaagcaacttgggtttcaaaagtcatcgtccaactggcataagcatagacatatagagatatggtttggctgggtccccacccaaatttcatctcgaactgtaatccccatgtgtcaagggacggacctggtgggaggtgacaggatcctgggggcagtttcccccatgctgttctcgtgatagtgagttctcatgagatctgatacttttgaagtgtttgggctgggcgcggtggttcatacctgtaatcccagcattttgggaggccaaggtgggcaaatcacctgagctcaggagttcatgactagcctgggcaacatggtaaaaccccgtctctactaaaaacacaaaaattagccaggcgttgttgtgggtgcctataatcccagctattcaggaggctgaggcaggagaatcgcttaaacccaggagttggaggttgcagtaagccgagatcatgccattgcactccagcctgggtgaaagagcaagactctgtctcaatcaatcaatcaataaagtgtttggtagtttcctctctgtctctgtctctcacctgccaccatgtaagacataccttgcttccccctttgccttctgccatgatggtaaatttcctgaggcttctccagccatgaagaactgtgagtcaattaaacctctttcctttaaaaattacccagtcttgggcagttctttctagcagtgtgaaaacagactaacacatatagaccaagagaacagagctgacagtatagaaataaacagattcatggacaactgaatttggacaagggtgccaagacaactcaataaggaaataatagtcttttcaacgaatggtactggtacaactacatactgacgtgtaaaagaatgaacataggctgggcatggtggctcatgcctgtaatcccaacactttgggaggccgaggcaggtagaccaccaggagtttgagaccagcctgaccaacatggtgaaaccccatctctactaaaaatacaaaaattggctgggcgcggtgtctcacgcctgtaaccacagccctttgggaggccaaggcaggtggactgcctgaggtcaggagctcgagaccagcttggccaacatagtgaaaccttgtctctactaaaaaatacaaaaaattagctgggcgtgctggcgggtgcctgtaatcccagctactcaggaggctaaggcagaagaaccacttgaacccgggaggcagaggttgcagtgagccgagatcgcaccattgcactccagcctgggcaatgagagcgaaactgtctcaaaaaaaaaaatacaaaatttagctaggtgggagcaggcacctgtaatcccagctactcaggaggctgaagctaggagaattgcttcaactcaggaggcagaggttgcagtgagccaacactccagcctggcactccagcctgggcactccagcctggcgacagtctcaaaaaaaacctattaaactttaaaagactcagatttgcattaaattgatacagaaaaagaaaaaaaccacagatagagaagcgttaaagacctcttttagaaaaaggagaaactggccaggctcggaggctcacgcctgcaatcccacctgagaggtggaggttgtggtgagctgagattgcgccattgcagtccagcctgggcgacagagcaagactccgtctcaaaaaaaaaaaaaaaaaaaaaaaaaaaaagaatgaggataaacctcttcctcacatcatgcaaaccacgtacaaaaattaactcaaactggatcaaagacctcaatataagagctaaaactacaaaattcagagaaggaaaacacaggcataaattgtcatgacttttgatcaaccaatgacttcttagataagacaccaaaaacagaagcaacaaaagaagaaatagataaattgaacttcatcaaacattcttgtgcttcaaaagatatcaagaaaatgcaaagacaacacagaaaaataggagaaagtattggcaaatcatataagaactcctacaactcaacaataaaaagacaatccaatttaaaaatgggcaaaggatgtaaggcacccggcaaaggcacctgtagtcccagctactagggaggctgaggcaggagaatggcgtgaaccccggaggcagagcttgcagtgagccaagattgcaccactgcacgccagcctgggcgacagagcgagactccatcttaaaaaaaaaaagaaagaaaagaaaatatacaaacgcccaataagcacaagaaacactgctcaacatcagtcacgaaggaaatgcatctcaaaaccacagtgagacacaaagtcatacccactaggatggctggaatcaaaaaagataccaacaaggacaaggaaaaactggaactctaatacactgctggtagaaattaaggtgctgcagctgccttggaagactttgggagttcctcaaagagttaaacatagagttaccatatgatctagtaattctactccccagtatatacctaagataactggacctgaacatacgaacacatctagattaggctcagaggatcttcccaaaggcaagccccagaggccttcacaaaagaaacaaactacgttcactgagaaacaactggaagatctgaacttgttcaataagaacgtatacccaaaccccagccttcagaaagatatggtctccaaaatggaaatagatccaaaagtactgtaggtttggctcaaaaaccttggagcaaaactcaagaaagccaaatgcaagcatatttggcaaaaacaagaagctcaacaacagcaaatatctgagaatgaggctgggtgcggtggctcactcctgtaaatcccagcactttgcggggctgaggcagaaggatcaggaattcaagaccaacctgggcaacatggcaaaaccctgtctctatgaaaaactacaaaaaatagccaggagccaggtgtgttgatgggcacctgtagtccccgctactcaggaggctgaggtgggatgatcgcttgagcctgggaagttgaggctgcagtgagctgtgatcatgccactacactccagcctgggcaacagagtgagaccctgtctaaaaaaaaaaaaaaaatctgagggtagactcaagaccaatccttctcagggaaatatggacacactacccacatccccaaatgaggcccatcctagagtttacacagatcatcaggcaccctcattccaactaaacttaggccccagtggtagggaccctatagaccaccccagtggccccaaaatagttcattttggctgctgccaagatctgaacatatacggcttctagacacttcagaatcccaagttcattctccaagcttccattttaattcttttggttcctcatctctacaaaatagagacatcagacacaaaaggtcacatattgtaatggtttatgatgattctcatacaaaagaatacttttcagcaggaagaaacaaacttgagatatgcacaacatggatggatttcaaaaacattatgttgagtggagaaaaaagatgccaaaggatacatgctgtataattccatttctatgaattcctagaacaggagaaactaatttaccatgtcaaaaagattcgtggcccaagtagaaagaattgaatagaaagaggcgcaagacaaatgcattggggtgatggtaatgtttcatgtcttaatgacctaggcagttacctaggtgtataaattcatcaaaacacacagaactgtgcatctaaaatctgtgcattttattttatataaattatacctcaattaaaaattaatatacaacaaaactagtaaggacaatttctttattttttttcctgcttctttgttttgattttggttttggttttttaattgttgttgttgttccatttgttcagctaatgagatttagtcagcatcactaagtggacagttggcttatgtttctaaatcctgtttttgggtcacctccctccatcatcatacttgaatgacctcgtcaagctcccttcattcattttggctctccccaagacgttcttcacgtagtcaccagggtaatgttattattcctttaaaaatgttgcactattccttggcctggcacggtggctcacgcctgtaatcctaacactttgggaggctgaggcgggtggatcacgaggtcaggagatcgagaccatcctagttaacggtgaaaccctgtctctactaaaaatacaaaaaattagccaggcatggtgacaggcgcctgtagtcccaactactcaggaggctgaggcaggagaatggcgtgaacccaggaagcggaacttgcagtgagccaagatcacaccactgcactccagcctgggcaacagagcgagactctatctcaaaaaaataaaaatgttgcactattcctctgcttaaaatccttccatgaataagttctgaagatctactgtacgtcatggtgactacaggtttttttttggtttttttttgtctcaaagaaaaaaccacatcatatgttgtaccccataaatatatacaactaaaaaaatactttcatggccatttttcatcattcaggaaaaaaaaatatgcccacatataaagcttgtatgcagatgttcacagcagcattattcacaatagccaaaaggtagaaacaacccaaatgtccatcaacagatgaacagataaataaaatgtatatagctatacagaggactattattcaaccataaaaaggaatgagaatgaactactgatgcatgttacaacgtggacgaatctcgaatacattacattaagtgaaagaagccaacaactaaaggtcccatattctatgaggctatttacatgaagtatctaaaatagacaaatctagagtcagaaagtagattcgcggttgccaggagctgaggtgtcagggagcagacagtgaatgctgacaagtgtgtggtttctttctggtgtgctgaaaatgttttagaattagataatgctaatgattgcacaactttgtgaatatactaaaaactactgaattgtttttcaagggtgagtttcatgtgaattatatctcaattttttaaaacaaaaagaaaagagtccaggcagtttgtttgtctctacactcttccagcacagcctagtcagcccaacttcccaaacttcaatcctggctcccctggttaagagcgtgtgacctgagcaagctactcaaattccccatgcttcaatgtcctgtctgtaaggtagagataagagcacctaccttggaaggttactgggagcactaaaagggatcatccataaagtgcctgggccacaagggtgctcttatggttccaaaatataaagtcctttagagcaagtaacctcatgagaaaccacatcatccctagtgggcaaaaaccgaacctggcagggaatggggaggtgaaaaaaatcttagacattacaacagtttgtggccctccaaggctcaatcctatccctcaacttttttattttttatttttattttttttgagacagggtcttactttatcacccaggctggagtggtgcagtcatggctcattgcagcctcgacttcctgggctccagcaatcctcccaactcagcctcccgagtagctgggacgacaggcatgcaccactatgacgggctaatttttgtattttttgtagagacgagaattcgctatgttgcccaagctggtctcaaactcctgagctcaagcgaccctcctgcctcaacctcccaaagtgctgggattacaggtgtgagccaccatgtccggccccccacaacaaaatcttattccttagtagctcatttctcttctcagagtgaacgtgaatttaattattctcctcggaaaaacaatcatgaaaaaaaaaaacttgagaaacattgcgtttgaggggaaaagaataaacgcaggcctttatggccaactcactaacctgtgtagaatatttggacaaagagaaactccagaattttcatttagctctacttgtatctttccttccactttaccacctacttctcccacctcctcgcagacacacagccaagggaagcagaattcacctagagggtcaggcccacccaatgtttcagcagagttctacatttcagaaatgacatctttgattcaggacagagagttcgttgatttcagctttgggaatgggggaaaggacgtcagttcaggaagatgagaagataaactaacaccgtggcagggcagacttctgggatgaaggtgcgtgggaaacagggaaacgaacagggcaacctcccgcgggaagctaaaggcaccattgtcctcagagcaatcaaaggaggaggagaaccgctcagccaatggagactcaacccggaatttagctgtaaaaacattgatttagccccctgcggtagcaggcactggcagtgtaaaaggagccaatgatgaaattcccacacacctctgaagaggaatgaggcaggagataaacaaaggaagaggaaggaccggaagagcccaaagaatacatccacacatcccggatcaagtttctccactctgccaactgtttcctcacctaagtgcatttccgttttctaggagcgtggtccatgagccatggaccatgcaaacgccttcaagcagcgctgggtgctccgatcaaagcagaaccgcgctgtcactgatacgtcgtccagggtgtttgccttccagtggataaaggcaaacaggacactttaaatttgcacttcgagatggaaacaaaggcatggaaaagagaagggaagtcaagcaaaaggctcactcccaaagatcaaagctaaggaagccctggctgtccctaaacaaaggagtttcctcctataatagcagccagcagaaatctgttaagtaactaaagctcttgacttgatgttacaatgtatggcagcaggcaaggcatatcttctctgctcaacttaaaactcacatccaagaagcagtccgggagtgaaagaccccaggttaaactagcacaggtggccctgcccaacagggggcattggcaggcagcagctctgcagtgagtggggaacagaaatctcaacaacccactggtacccagagtcagatcacggatgctgctaatttttctgactcttgtttctcctcttccaaatcatcttaattcaacgtgaaattgttaaaaagctctagtaacaaattggatggagcaaggctggaaacgcagaggtaaagaatttgaaaatacagggccaggcgcggtggctcacacctgtaatcccagcactttgggaggccgagacaggtggatcacgaggtcaggagttcgaaaccagcctggatggcatggtgaaacccccgcctctactaaaaatacaaaaattagccgggcatggtagcgtgcacctgtagtcccagctactcgggatgctgaggcaggagaatcactggaacccagtaggcagaggttgtggtgagccgagaccacaccactgcactccagcctggacgacagaacgacactccgtctagaaaaaaaaaaaaaaaaaagaatttgaaaatacaagactaaagggaaaaagttatttttaacttttggctatccttgctgtcttttgtgtttggaaatagagaggataaaggagagctacaaaattgactttcacttgatattatgtaaaaagacaggccagatgcagtggctcatgcctgtaatcccagcacttggggaggccgaggcaggaaggatcgcttaagcccaggagttcaagaccagcctgggcaacaaggtgaaaccccatctctactaaaaacaaaagactagctgggtgtggtggcacacgcctgtattcccagctacttgggaagattaggtgggaggatggattgagcccaggaagtaaaggctgcagtgagccatgatcatgccactgcactccagcctggatgacagaatgagaccctgtctcaaaaaaaaaaaaaaaaaaaaaaaaaagacaatataccctatggcacttttaagggtattggaaaatcaagtaacagcgtaagagttatcacaaagtcactgcaagcaggagctgaaatagtcaactaacccagatggagctgaaaagaggaattgcgaaaccatgactgacaagatgctcagggaaagggcaggtctcgctgaataactgagaaaataatacaaatattatgagaataaatatctttgttgccacacagaagaatgttattattgtgttctgtagacagccgatacaccgccgaggcctgctaaggtgtgctgcattcacatccacagttacctcccacctcatccccccattccactgatgtaagctgaggaagaagaggagttttaagaggtatcccaagtggtttagttacccactcatgtgtaacaaaccaccccaaaattcagtggcttaaaactaatcatttattttgctcacaaatctcaatttggacaggactgggcaggaacagcttaactctgctccatgtggcatcaggtagagtgactaaaccagggctggatgacctactttcaagatgcctctgtcactgagctggagctgcctgtcagctgggagctcagccagggctgtccacgaagagccacatgtccttctacttcatgtggatctcgccacagggcagcttgagcttcctcacagtatgggagctggactcccagatggcatgttccaaaagcccagatggaggctccaaggtttctcatgatctggcctgagaattttcagaatgtcacttctaccatatcccaatggacacacaaatcactaaggtcagttcagattcaagggagggggaagtgactccacctctcaataggaggaaagaatttgcagccatcttcaatgcgctgcaacaagtttgtgccagcaattagtcttccccttctgcatgagaatgacatgtccctaaatgggcatgctcctttggcccaggaccctgcacaagagagatgtagagagcagagagctcaaagcagagtcacagctggaaacagcgcagcgaacctgctgagcatgagtaacatacccaagaaactaggattcactgttagaagccactgggattctaagcttatctgttacttcagcaatctgattaacacaatgtgcaaaactgcattcctgacaacagccttctaagcccttcctgctacattccccatctgcacaagtgacccaccatccacccacaggccatcacctcctaaccagtatggacatgtctctatctcagcgttcctactcccaacactcatcaagcccattatcttttcccatgtggccacaatctgttccaggtttgctcccctccaatcccttctgcaatctgcctgaattgtgaccttcctaaagtgcaaatctgatcattctgctttaaaaaaaaaaatagttttagcctactgtccctgggatcaagtccaaattcctggttaacacatataagccttgtttgatgtatatattatgtccaatttgagtatattcaattctgctacatagaaaacaagaaaaccaatagcatggatgaaactcatagtgagtcaaaagcttgtaagacacgctcaagacagacaaaataagtggaacatacgtgcattgaacatagataaaaaggacaaaaccagagtgttagtcctaggcagaaagtcacgggagaaccaatcttttttttttttagaggaagacagggtctcacagctttgtcacccagcctagagttcaatagcgcaatcaggactcattgcagcctcgacctcctgggctcaagcaatcctcccacctcagcctcccaagtagatgggaccaaaggcatacgctaccatgcctggctaaattttttttttttaatttcttgtagagacagcatcttgctatgctgcccaggctgaccagggccaatcttatcaaatcttaaatattagtaagacacaaactatgccacttgacagttatatcatccttaatttggccacccattttgaccccatttatatactgtctagaaacacatgaaaaaacacacacagcatcccagcaggtctctggtaagccacagctattgcagacatatatatccaaatatctccaacaaagcaccttccaccttctgggcccttgtgtaacttcagctctagtccttgtgctgacaccattggcagggaaggctgatgcagcagagagacaggactccatgtatgaacattgcatggcccaggattcaggttgtgctgcttccattccataggcacctgatcctaagtgttaaccaatcccagaactctccccttatttcttgctgcatgttttgaattgatgtgataaacaatgtgattcgagcgtcttaactcagcctatgagcctctctattctgtgactgctggaataggctgcttggccatgttcttggaagctaccaccatatcagggtaatttcccacacaacattccagcccctgctttcccctctggccttatctagggccattccccaactcaggtgaatgcagactccaaatgtactgagctgtgtgcaggggccaggtgcaaatgctttctgtgcatctgcacatgctgttctacctgggaagtcctttcctcctttcacctatttttaccttaaacctcagacatcatctaccctggaaagtccttcctgacctcacgcatctaagtaggtcccccccataatccctatccatgccttctatagtacttaacatggtgacctttaattgttcatttacttagctctctgctctcccacactgtgaactccttacaaacagggaatgtcatctctgaatgaatctttcatctccatgtaacacatgcctccaaccctacctagcacacaatctggcatataacaggcactcaataaaccttcaatgaatgccttgatcaagtacaaggaacataagcaaatttcctgtggaaaaaaagaattgtattaagttctttgggtcaacaattcttactaaatgcaattgctaatataagtatagaaaatattgaaaactgagctgaatctgccatcacttgttggtattactgcatcaagcaaaataagtgaaacgtagctgttcaataaatgttaatgaatgaataagcgaaaatatgagtatgtgaatgctacattttttaaaactgaattttaagatccatttatctgttgttggtaatctgtagaattaccacagatcaaagccatttgaaatatccaaaattcaaaaagatattttaaatatctttaagagttgtatagtcttaaagatgtgaaaaaatataagatcccatcaattcaaatgtccttcttccataatatatttttctatttaataccttaggaccctgttaaattcaaatggctgtgaagtcaggtagaacatacacacacagattcataagaaccccccaaaatgcaaaatcccatcaagcagtcaacccaaatgggaactgtcaacttggctagaagacagtgagctatgagatcaatccctttttaagttttgaatcctaatttataaaatggagctcggggtaacagccagagtggtcaacatgaatggctctggacgtctctagctcctggttgcaagacccactgatgtctctgatcataagtgaaattagttaactggactgtggcaatcctccttgttgggaaggcattctcctaccccagaaaattaagaattaagtaaccacggccgagcgcggtggctcacgcccgtaatcccagcactttgggaggccaaggcgggcagatcatgaggtcaggagatggagaccatcctggccaacatggtgaaactccgtctctactaaaaataaaaaattagctggttgtggtggtgcaggcctgcaactccaactacccgggaggctgaggcaggagaattgcttgaaccaggaagtcggaggttgcagtgagctgagatcgtgccactgcactccagcctggtgacagagtgagactccgtctcaaaaaaaaaaaaaaaaaaaaaaagaattaagtaaccaccattcagcaagaaggtcttaattaaatcttccttggaaagtcagttaactgaaatgatagctgtgacagagatgctaattatctcccaaaatctagcctttctttctcccttacaagaacagaactcccagtttctgctgaatccatgactgtccagctagggaatgcattttgcagactaccctgcacctaagtgaccaagggggctatgtgacaaagttctgtacaatgaaatgggagcagaagtcgccacgtgaaatttctgaatcacaacagtattttttttaatttactaattttttagagatgaggtttcactctaatacaatggcaatcaaagctcactgcaacctcaaacttctggcctaaagtgatcctcccaccccagcctctcaagtagctgggaccacaggcgggagccaccatgccaagatggatcacagttttaaagaggaaactggttgtctcccaaccttctctcttcccccactctgaaggctagatgaagctgacactggtggagtagcacgggagccagactctagcaagagagaaccactacctaggatagaggagggaagacaggagaaggaaccaaggaagaagatgaggaaaaaaatgggtccctggatggacttccaaagcaaaaccactgcccagagagagaaatttaacttctagcttgtttgagcccctgtagctctgggtcccactgttatacaacttagcctgtatcctacataatatagtaactatgttccttaagacgctgtacatcttttagccccataaagacatataattaacaatttaggaaattaaaagcacggcagtcattattttatgctaaaaaggaacctgaacatatttgatattttatataattgcaatattttggaaagtctgatcttggctttaagttgaaatcttactaaatttatatataatattagaatatataagaaaacttcaagcttaccatatttgtaaatttaatacagtcatgtaccacataatgtctcgcccaacgatggaccatatatatgatggctgtccctcataagattacaatggaggtaaaaaattcccatggtctaatgacattgtagtacagcacagtactcacgtatttctggtgatgccggtgtacacaaacctactgggctgtcagtcatataaaagtatagcacagacaaggccagacgcagtggctgatgcctgtaatcccagcactttgggaggccgaggagggtggatcacctgaggtcaagagatcgagaccatcctaggcaacatggtgaaaccccgcctctactaaaaatacaaaaattagccgggcatggtggctcgcgcctgtattcccagctactagggaggctgaggcaggagaatcacttgaacccgggaggcagaggttgcagtgagctatcacaccactgcactccagcctggcgacagagcgagattccatctcaaaaataaaataaaataaaataaaaagtataggccaggtgcagtggctcacacccataatctcagcactttgggaggctgaggcaggcagatcacgaggtcaggagatcgagaccatcctggctaacatggtgaaaccctgtctctactaaaaaaatacaaaaaattaaccaggcgtggtggcgggcgcctgtagtcccagctacttgggaggctgaggcaggagaatggcgtgaacctgggaggtggagcttgcagcgagccgagatgcgccactgcactccagcctgggcgacagagcaagactcagtctcaaaaaaagaaaaaaaagtatagcacagacaattacatacagtacacagtacctgataataaacaactgttactggtttatgtgttttctatgttttctattattttagagtgtactccttctacttattaaaaaaacaaaacaaaacaaaacaaaacaaaaaaaacagctgggtgtggtgcctcatgcctgtaatcccagcactttgggaggccgaggcggggggatcacttgaggtcaagggtttgagaccagtctggccaccatgtgaaacctcatctctgctaaaaatataaaaattagccaggtgtggtggcaggcacctgtaatcccagctacttgggaggctgaggcaggagaattgctggaacctggggccggaggttgcaatgagccaagatagtgccattgaactctagcctgggcagcagagtgagattctgtctcaaaaaaaacccaacaaaacagttaactgtaacagcctgaggcaggtccttcaggagctactgtgggggaaggcattgttatcacaggagttcactgctccatgcacgttactgcccgtgaagaccttccaggaggacacatgtgcagtgaaagtcagtgatactgatgatcctgaccctgggcagcctagactaatgtgtgtgtttctacgttagtttttagcaaaaaaagtttaaaaagtaagaaacaggctggacatggtggctcacaactataattccagtgcttggtgagggctgaggtgagaggactgcttgaagccaggagttggagatcagtctaggaaacatagcaatttgtatgttcacaaatttgtagagataaataaatgaaaataagaataaaattttaaaaacaaaatttttttttaaatatataaaatcttagaaaaaagcttttagaataaggatagaaagaaaatattttttacagctgtacaatgtgtttgttttaagctgttattacgaaagaatcaaaaattttaaaaaatcaagtttataaagtaaaaatatgatagtaagctaagattaatttattatcgaagaagaaggctgttataaattcagtgtagcctaagtgtacagtgtttataaagtctaaagtagtgactgttgtgtcctaggctttcacattcacacgccactcactcactgactcgccctgagccactttcagtcctgtaagctccattcatagcaagtgccctagacaggtgtactgttttttatcttttatactgtatctttactgtgccttttctatgtttagatacacaaatacttaccactgtgttacagctgcctacagtatccaatgcagtaacatgctgtacaggtttatagcctaggagcaataggctaccccataaatcccaggtgtaaagtaggctacagcatctagacttgtataagtacactctatgatgtttgcatgatgaaatcacctaaggacgcatttctcacaatgtgtatctgtcgtgaagcaacacattaactataatgtatacgaattatgtaagtgttcaaaaacgtggtgtctgttaatccagacaacttaaaaatctaaaaagaaactgggaggaggggtagggggagtcatgaggaaggagcaggagcaagtagatggactcagggggtggggaggcacgtgtagttctagcggtgagttcatgggtatttattgtattatttcaaatccacaggtgaatgagatccatgcataaaccaacgatgagagtacatttggaacaaggagtatggttaacccaattctgtgtacctagagtcctaaaatgaaatgaaatattttaagatatttgagtttgtaggccaggtgtggtggctcacacttgtaatcccagcactttgggaggccgaggtgggcaaatcacaaggtcaggagatcaagaccattctggctaacacggtgaaaccccatctctactaaacatacaaaaaaaattagccgggtgtggtggtgggcgcctgtagtcccagctactcgggaggctgaggcaggagaatggcatgaacccgggaggcagggttggcagtgagccgagatcgtgccactgcactctagcctaggcaacagagcgagactccgtctcaaaaataaataaataaataaaaaataaataaaagtccaaggagccagaatggtggctcatggctgtatcacagcacttcgggaggctgaggcgggcagatcacctgaggtcaggagttcaagacccaccctggccaacatggtaaaaccccgtctctactaaaaatacaaaaaattagccgggtatggtggcaggtgcctgtaattccagctacttgggaggctgaggcagaagaatcgcttgaacccaggaggtagatgttgcagtgagccaagattgcaccactgcagtccagcctggacaacagagccagactccgtctcaaaaaaaaaaaaaaaaaaagcccaaggaattggttactgatagaatctggaagtttgtcccctccaaatctcacgttgaaatgtaatccccagtggttgaggtggggcctgtgggggaagtgtttgggtaatgggaacagatccctcatgaatagtgtggtgctgtcctccctatagtgagtgagttctcacaagacctggttgtttaaaaatgtgtggcacctcccccagctcagtctcactctcattcttgccatgtgacacacctgcacctctgtcactttctgccatgactgttcctcaaggccctcaccagaagcacatgctggcaccactcttcctgtatggctcgcagaacctcttctttataaattatccagctccaggtatttctttatagcaatgcaagaactgcctaatacagttaccatatgacaaggcctctttgtagttcaaaaagaaaagccagatattagcaatttcatgtgatttgacctacttgattatttaatttatattttcaataaattcaaaatcatttttaaaataaaaataaagtttatgaatcgtcttttctgcatatgaaaattagccctgaattggctgggcgcagtggctcatgcctgtaatcccagcattttgggaggcagaggcaggcggatcacgaggtcaggaaatcatcccgactaacatggtgaaaccccgtctccactaaaaatacaaaaaattacctgggcgttgtggcacgcgcctgcagtcccagctactcgggaggctgaggaaggagaatggcatgaacccgggaggcagagcttgcagtgagccgagatcgcgccactgcacttcggcctgggcaactgagcaagactgcgtctcgaaaaaaaaaaaaaagaggccgggcgcggtggctcacgcctgtaatcccagcactttgggaggccgaggcaggtggatcccaaggtcaggagatcgaaaccatcctggctaacatggtgaaacaccgtctctactaaaaatacaataaataaataaataaataaattagccggatgtggcagcatgtgcctgtagtcccagctactcgggtggctgaggcaggaggatggcgtcaacctgggaggcggagcttgcagtgagccgagatcgcgccactgcactccagcctgggcgacagagtgagactgtctcaaaaaaaaaaaaaaaagaaagaaagaaagaaagaaaattagccctgagttcaccaaaaccgtcgtatcaacagctggtcgtcttctaccaaacataagagacacaagtactgtttgactggacctaggttaataaaagctttattttggaatctcaatgatctagatctctttaaaaccattaattcgttctctagttactagaaaggatagaagcattggttaaaatcttatctctcacttagcagctggttaaaaccttgtctaggccgggaacagtggctcacgcctgtaatcctagcactttgggagcctgaggcaggcagattgcctgagctcaggagttcgagaccagcctgggcaacacggtgaaacccggtctctgctaaaatacaaacaattagctgggcgtggcagcgtgcgcctgtagtcccagctacttgggagggtgaggcaggagaattgcttgaacccgggaggtggaggttgcagtgagctgagatcgcaccactgcactccagcctgggcaacacagcaagactccatctccaaaaaaaaaagaaagaaaactttgtctgtcacttagcaatgatattcctatcactttaggaatgtcatttaatcttataacctaagttttcttatcttcaaaatggcaataataataatgataatactttgtagagccgttaagtattagtgatgacagctgcagccagtctggagcagggtaggcgcggccagggatacgcgctctgtggaaccagggggagctgggagcaggcaggagcccttcccgcttctgagttggcagggcaggagcccagtgctcccaggcataactgcagcctcccagccacagctgcggacctgggcatccctgcactctcaggggtcccagaggcccccgcttccccacaggcttggaagtgcctgatcccgctgcctggcctcttcctgctccctgtgcccgctctgattctggagcaaaattgaagctgagcctgggcggtgtcgcaacccggccaggtgggtgctgctcaggatggcgctgacacaccagccccctgccacctcagcccccctctagactttaggagccactctggaccacgaggatgggagggaggccgaggaggggctgaggacggctggttgcaggcctgtaggcacccctcagcacaaacagcctgggcaccttggacaacatgactgacagcagaaggcagacaggctcataggtagaaaggggcgggtccctggtgacgccctgccttcaagccaagaccagcccaaaacctggggacctggctgtcagttccaggtgaagcctgtggcccagagtgagaacttagagtgctttttctggcccgcccatggctgcccatggaccaatcagcacgcgcttcctcccttctgagcccatgaaaacctcagacccagccagactcacacagaggctgggactaccagctgcagaaaggagctacccacttcaggtctcctgagagctgttctgccactcagtgaagttcctctctgccttgctcaccctccacatacctcattcttcctggatgcaggacaataactcaggacccaccgaatggcagtactaaaagagctgtaagacaaaccagggctgaaacatgtccccgtactcactacattgcaggcaacaagaaggagagaagaactgtggccctttaagaagccaagatctaggggctccccaagccaaggctgtaaacaccctctttggggctctgcggttcccagcgtctccatgcttccaggtgccaccatgttccccttgtccagacacaggtgcccacagcaaaagcctcattcagtacacctggtccagccacagccttgcatggagccacccaccccccccccccccgaccctgcacttctcacccacacaccccttgccgctctgcacccagcttgcccctggtaggtgtgcaatctgagctggtagaatgagctgagtgcagcctgccaggccaagtgggtggaataagaccagtgggcacaagcaatacttaggcagaaggcaccgctagccacagaggtttctgtctggtgaaacgacaccccaaggatcctgtgacattaggggtaacgtttataaaatacctagcaagggctcaataaatggcttattattatcataagtgtctacagggctaaacgaaacattacaaaccttcaggagagaacgtactgtcttaacacactgcactgctccaggcccatctgcctgatgctctgcccgctccagggcccccatcagaaagtctctcgctatcctatactatctgcacctgcctccccttattttggttcaccctgaattccagtcaattacttcttgtttacttccccatttttcttcttctctcaatacagcatcttacagataatcttcatgaaatgggaatccagtaaacatggctagcatcagcaaaatccccactggatgatctacatagcagggaacaatggcgggtgaggacccacaagtgaggggaaggaagctgcaagggtacactggggtcagacctccaggagcctcagggcatggactgcacctggagggatgacatccaccaaaagcttatgcaacactgtcccaactggatgtgggtccagaatgactaactctggccatcaagaggaatgcccaaagaagggacatgagacagggtattttcacagctcagacaaaagataatgaacatgaggatggaatgaggagcagtggagatgaaggagaggagctaacaatttagggagtgctgttacaactcataacttcacggaagcgaggaggaggtgcgaggaaaagccggctggcgtgttaatttgggattttctctctttgaagcagaagaatacaaacacaactcattttggacatgtggctgaggttgaagtattttcagaatactcaaggaaagacgtttaggacgtaggtggtgatataccccagccactcaggttgatttaggaagcaagaaattgtaggaatggatgagatgacctgagagagagtgctgctcaataaaaatataacgtgagccacaaatacaagccacacacgtggttttaactttcctagcagtgaccaggcgtggtggctaacatctctaatccaagtattttgggaggctgaggaggtaggatccctggagccctgagtttgaggcttcagtgagctataatgaccactgtactccagcctaggtgacacaataagaccctgtctgaaaaataataacaataaatttttctagcagccacattaaaaacataaaaagaaacaggtgaaaataattttactaatatatttaacccaaaatatccaaagagaaagggagccacaaaggctaggaaagagcactcataaaaagacaaatttgaggccgggcgtggtggctcacacctgtaatcccagcactttgggaggccgaggcaggtggatcacttgaggtcaggagttcaagaccagcctagccaacatggcaaaaccctgactctactaaaaatacaaaaattagcctggtgtggtggcacacgcctgtagtcctagctactctggaggctgaggcatgagaatcacttgaacccaggaggcggaggtcccagtgagccgagatcacaccactgcactccagcctgggtgacagagcaagactctgtctcaggaaaaaaaaaaaaaaagcaaatttggttttgactaagacacatcagttccttatgggacacaagtaaacatggtactcactgtttctgaagaggatgatctctgtaaattctcactttgtacccaaatgctctccgtcacaaatgctatgtgttctgcttcaagtataaaaggagacacaagaaatagggcccacttgttcaagtcttcaatggactgtatagagggaaagaaatataatgagattgtcacttcataccacaactgccataaatttcaaccccctctgaaacataccctcccctataattccaagtgacatggaaataagcttatctgatgctcctctgcaggccgcaggaaccgtgtgtttcttgtttagctgtgactgtttaagcacctgcaaaagcccatcgatgactcaggacagctttaatatctctagaccactgttttcaagccatgaattctgaaacggggcctatccccgccattcctcactgcttagcacacagtagctaaccgggaagtacatttaaagatgaggaggctggccggcacagtggctcacgcctgtaatcctagcactttgggaggccaaggtgggcagatcgcttgagcccaggagttcaagaccaccctggccaacatggtgaaaccttatctctacaaaaaacataccaaaaaaatgagttgggcatgggggtgggtgcctgtagtcccagctactcaggaggctgaggtgggaggatcactcgagcctgggagcccgaggttgcagtgagatgagatcatgccactgcactccagccttgggtgacagagtgagaccctatctcaaaaaaaaaaaaaaaaaaaaaagatgaggaggcctagaagtacgtacccaccaacagaagctccttactcacagaagcctgaagggctgttccttcattccctacagccatcacagcacagggcaccaggcagtttttctttacaccttccttatagtgaaatcaaccctgctcctctcccggagatctgggaagtgtgcaagtctctggatgctcacacagcagttaaatccagagagaaaagctatttcagggaaaggcatttaccatatgcagacgcaatcagacatactttaatggaatgtaaactccagtcaggagtgattgtagtttttcaaaaagaagattagaatcaagattggttagcaaatcagaaatacccagttatctctcgttttctttcctgaaatctctctaagaaaaacagcaaattgatttgaaaaggctttcacatacaggatatagccagagaagaaaaagatgaaatctgagcggggtatgcaggaggctttcaccatcacccagaacgaaggtaactaggcaggctccactgtgctgcatatcagttcaaatctgcttgataaaaacctattgaactaaataatgaatgaaaatttaggggagaatttgcccctccctcagtaaacataattatcaatatagtggttaaaaagtatgtccacttaggccgggcgcggtggctcacgcctgtaatcccagcactttgggaggctgaggcacctaaggttgggaattggagaccagcctgaccaacatgaagaaaccctgtctctactaaaaatacaaaattagccgggcatggtggtgcatgcctgtaatcccagctactcgggaggctaaggcaggagaatcatttgaacccgggaggcagaagttgcggggagccgagatcgtgccattgcactctagcctgggcaacaagagcaaaactccatctcaaaaaaaaagtatgtccactttatccaagcatagaatgtgtacattaaacagacaaaaagcttgatactgccaatttgtataaactgtctttggttaaacttatcaattgattgtagggcattcaattataaacacacatattcagtattcatgcatttgattttaagtgtataacatatgagaacacgccaggcttggtggctcacacctgtaatcccagcactttgggaggccaaggtgggcggatcacctgaggtcaggagtttgagaccagcctggccaacactttggtgaaaccctgtctctactaaaaatacaaaaattagccaggcgtggtggctcatgcctgtaatcccagctactcaggacgccaaaggaggagaatcacttgaacctgggaggtggagattgcagtgagcggagatcgcgccactgcactccagcctgggtgacagaatgagatccatctcaacatatgggcatgagattcaggtgtgtccttatttcagcccaagtagactgaggtatccctcaaaagtagacccaagcagactgagatatccaccaaatcatcaacctgatcatattttaaatctcaaaataacagtagccaaccacaaataaatggtcaagctttccacctgtagaccttcaacatcacagcttaaacccaacaactattaaatttactatttcaggtcaagctgctatgctaaacagtctcatttcctaataagaaaaagatacgaactagaataggaactgtgatttaaaggctacagggatgcagagcatggccatcccatctagtctggaaaactaggaaatgacgcagcaatatctaaccaaatctgtaggcaaagcttactgtgcagagtgacagagcagagttacagaatccatgaaagcaccaggccactcctactccggcctgcacaggtaggcaagggctgaaaatcactagttatggttagtgtagttaacagaaggccagcggagtcatgaaaatgttcaaaagtaaaactgtccaagaaaatcagacattcccatctccatgtttttatatgtccaaaatttctattctgacttaaatcctaaatgtaattgatccaatttggaaactactacaaaaagctcacccctcaattttttgccattttattgagttatctttctcaatcaggttaattcccaacgctctaagccatacattgtatgtaatgcatgaacttcttccccttttgtctgggtagtgtcagttatgtggaggtggtactagttatttgcataactagtaccttgggggacctgagaaaacagtcattcatattcagtgtgacataatacatatatggtactaacaagaaagagtattttttatttgctagtggcacaatttcaacccatatctaagcacagcctccaggcaatgttcaaacctgagataagattcaattccccacaggggctttacggtgtgacatatgcagaaaacgtcattttagtgctaaaagtgaggcaatattccagaaaacagaggaaagggacaagaaacagattaaaagcaaaacacgtttaaatattaatgagaacaatgctaccgatgtccatgaaattttgtgcagtactgcactgtgaagctaagcccatttccaaaaacagctgaatggaaagatctattgttccctttacagcaaggcagcagactttttacagagattaattgactggcccaagtcacaaggtaggtgacagagtgggctgaacacgtaaccaccatcctaagcactgggtcaaaaaaaacaaaggctgactgtcaactgaaatttaaaagacgcaaagaccatcagtcgggtgcccaagttggtgaatgatgcaaccaactgacagaagatggagagggaaaagggcagtttttgtaaatttggggacatctgacaaaaagctgatgacacaggtgggagttttttgtttgggatttttttttttttttcttaagacagggtcttgctttgtcacccagactggagtgcaatggctcaatcatagctcactgtagcttcaaactccggggctcaagtgaacctcccgggatcaagtgaccctcccgcctcaccctccagagtagctgggactacaggcgcgtgccaccacgccgacctaagtgttttttttgttttgttttttgtagagaggggtctagctatgttgcccaggctggtctccatctcctgggctcaaagctgtccttcctcctaggcctcccagagtgcagggattacaggcataagccaccgctcccggcccgccacagctgtctctcctggttcacggtcacccaaacgccggctcgaagtgtgggagaggaggttgggggcgaccccaggtgggcactgctggcgtccggctgtcaatccacagctcacgtcctcacaggtgcgcgcctagagtcacgcgtccagcaccgcccggctggccgggaagaggcgaccgggtccgtggtccgagtcccgcacctccggcctctctctgggccccggggcaacagcccctcccgggccgcacaggccgcactgagggcgccactccggggctcccgaactcccgggctcccggcggggacgaggcgcagggacgggggcacttccggctcgcggggcccgggtcgcccgcccgcccgacccgcccacctggctgtcgctgacgcagaagacgcggccgccacggctcaggcacacgcgggcgcccgggggctgcgcggccgcgccgcagaaggtgaaggaacagcgcgaggcacgcagccgccgcaccgtggcgcgcacgagctcagccggccggcgaccccagcgcgcccacaggtacaggtagcacagcgtgatgagcatggccgcgccgccggcagggcgagcccgccttgcccgcccgccccagcgccccaggcccggccccgccccggccggaagggccgcgccgcccccccgggccaggcggcgcgggggtggggacggcgggggaggcggggacccggaaggtgacgcgggcaactggaggctgcggcgggaggggcgggggggggtgaggccgcgcccggctgtgtgatggggagctccggaggccgcgcccagggctggtggcggcggcgaggggcagcgctggggcggggggtgtgcaccggggtcaggggacgccggggctgcacccggagagggggctcgagggagtggaggccggggtgcggggccgcgccagggctgaggagtgggatgggtatgttgtggatgcgggggaggggaggctccagtggctgcccgacctgtttaagccaagtccggcctcccttccttggaggggtgggaggcggattgaggagggggctctgcctatgttcatagctgccaaggccaacctttactaaccagcagcacaccgggagtcccagagcgctccacagccgctacccagtcgacttgggaaaataagataaggccgtttttattaaattatactaagccttcatgcaaaagattttaaggtcaatcacatacattcacgggatgcaataatgtttttttaaataaggacaggaaacagaaattgaagacagataagcaccaagaaggctgcctctaaaaaggctgtgccaggaaggctccctatggtgttcttgctacatgtgggtcaacagtttgactgtaagcatcctaacaccagtgggaaaaggaaaacatcaccatgatttggtgttcttgtctccaagggaagcataattagtcctgacacagaggcttctcccatagaacctcatttctttaaaaggcattatgtaaagaacgtgttctgaacagctgcgaagcacagcaaagaattccatccagtggcttcctattctggccctcgctgaaaataggtggcaagatgcagcaaaagcaatcatgtacaccacgtccatgtcttaatctaaggatagtttttgtttgtttgtttttgagacagtctctctctgtcacccaggctggagtgcagtggtgcaatctcggctcactgcaagctctgcctcctgggttcaagcgattctcctgcctcagcctcccgagtagctgggattacaggtgcccgtcaccatgcctggctaacttttgtatttttagtagagacagggtttcaccacgttggccagggtggtctcgaactcctgacctcaggtgatccacccgcctctgcctcccaaagtgctgggattacaggcgtgaaccaccgcgcccagctaggatagattttttttaagagacaaggtttcgttctgtcgcccaggctggagtgccgtggcataatcacagctctctgcagcttcgaactctgagctgaagtgatcttcctggccaccatgcccagctaattttttagaaattatttttcatagagacagggtctcgctgtgtcgcccaggctggtctcaaactcctggtctcgagcagtcaaactcctgcctggatctcccaaagtgctgggattacaagtttgagccatggcgcctagccataaagatagatttttaaagtaccttggccatttgttcatctgctttaatatagctgcatagaacacccactcccagaacttcagacttttggttagataacatagtatattttcccccttgcatatagcgatagatttttaaaagagagaaaatccaaaaagaaataactgggcttaaaagcaagcatctctgtggaccagaaatagaagaaaaacaaagtgataaacaggactaaagccatatcctacacttctctacaggacagtggcagccggaaagtgggttcctgcatggtaacaagaccttaaaattgtgtcactggagaaggacgtgcagttcccgctgaggagagacttggccactccaggacaacacaggactacaagtcaggaatttgaagatgaaaagtgctcaacagtgataaatcctaaatgtttcactgaacaacctttcagatagccttcttgaagtttgctgaattatggctataaggaccactccccacccctgctaggtatggagaggtcatctcctctatctgaaggtgaccaacatctccagtttttccaaattccctaagggttttgagaccacaccttcccacaggtactctaactccacctggccaataggaattttctaggtttacccttaggtgtttcgagatatggtctcagaatacatcatgggaaaattacattttggggtcaatcctgtataccaattctaggttaaaagcatggggaccaccatggttcaacatgagctgacccttgcattgaagagtactgataccattcatgcctggggaaggaatagagggaggaagatatgaagggcacagtgagaagtgaaacagtcacataacaagctctgtttatgatcccgccctaaaatgatttcattttgcaaaggtcaaggatagagttgagtttcatcacccctatataacaaaggaataggggaaggatgcaaaaataatacaccaagggatattaatgtgtatgcacctgatcctcatcctgtagtccctcactgctcaaagtgtggtccttagagcagcagcagcagcatcacttggaagctcgcaagaaaagcggaatcctaggccccacccaaccccaaatcagcgtctgcattttgacaaaatcccaggagactcacaaacacattaaagttagagaagcactgctaacatcttcctctgtcattccctgggtctgggctactctagactctaataagacatttccaaaatgatgtggaaaataagaccacagactagggatttttttttttttttttagatgaagtctcacttgcccaggttggagtgcagcgcgatctcagctcactgcaacgtccgcctcccaagttcaagtgattctcctgcctcagcctcccgagtagctgggattacaagcacatgccaccacacctggctaatttgtgtatttttagtagagatggggtttcaccatgttggccaggctggtctcaaactcctaacctcaggtgatcgtcccacctcagcctcccaacgtgctgggattacaggcgtgagccaccgcgcccggtcagactagggatttagaagcaagactttgtcatttataagaacactgcagaaaggaacaagaatgacccagctagccactgaagaccacctctgaaacccatcaacatgaccggctttctataggaaaagtctccacagactcaaaaagtctctagtttcttgcccttaggaaggcatgccctgggaataatagtttggggacaagagagagtagagtgtttactgtcctatcccccattaaatacatggcagaacttccccagggaaagcctatcatactgacattaactcagtacctgtttgaacttggagagcattcagaattctcatcagtcaaatggccagagctgagaaggatagcttgttttgtttgtttttgagacagggtcttgctatgtcacccaggctggagggcagtggtgcaatcccgactcactgcagcctcgacctcgtgggctcaagcaatcctccctcctcagtttcccaaagtgttgggattacaggcatgagccaccacacctggctaatttttgtattttttgtagagacaaggttttaccctgttgcccaggctggtttccaactcctgagctcaagccatctgcccaccttagcctcccaaagttgtgggattacaggcacatgccaccacacctggctaatttttatatttttttgtagagacaggattttgccatgttgcccaggcttgtctcgaactcctggattcaagcaatctacccgcctcggcctcccaaagtaccgggattacaagcgtgagccaccgtgcccagcctgggatactttctaagaaccaaggaactatgtagaaaatcttcgccgggcacagtggctcacgcctataatcccagcactttgggaggccaagatgggcagatcacgaggtcaggagatcgagaccatcctggctaacacagtgaaaccccgtctctattaaaaaatacaaaaaagttagccaggcgtggtggcgggcgcctgtaatcccagctactgaggaggctgaggcaggagaatggcgtgaacccaggaggcggagcttgtagtgagccaagattgcgccactgcactccagcctgggcgacagagcaagactccatctcaaaaaaaaaaaaagaaagaaaagaaaatcttgatctctattcagtaactttaatacgtatattaacatgttcttgtttttggaacaatcgtcaaatcaagcaaaaagtaattttattttgttaatcaaaataaagagaaaagtagacaatatttagagcatcaaaagaatttaaattagaacatctttaactattggaaatatgcatttgaactcatgtctttaagaggaaaataattatctttcctagctctttcactgagatggcctcagagtagccttaccccaagatgcacctgagtgctcagattcttgaatgggtgctcttctcctcattacaaggaactagaaatccttggagaaatcactgattctggtgttcaagagataccagataagctggaacatcttatgctaggaagcaggagaagcttcaaagaaaaataggtccaggcagaaggatgcaggagacaagctagaagtgccaaatcaggacgatttgagtatcaaattgaaatacacccaattatgaaggtacccaattttcaagagccggctgggcgcggtggctcacacctgtaatcctaccactctgggagactgaggcgggcagatcacctgaaatcaagagttcaagaccagcctgggcaacatggcgaaaccccatctctactaaaaatacaaaacttagccaggcgcagtggcatacacctgcagtcccacctactcaggaggctgagccaggagaatcacttgaacccaggagacagaggttgcagtgagccgagattgcaccactgcactcaagcctgggtgacagaaaaagactccatctcaaaaaaaaaaaaaaaaatgaagagccatgaaatccatggttatcctcaataaaatttaaatattcgaaaagaatgtaggataaaatgtgttactgctgagtctcgttatttggttatgtttgtattgattcatttgttgtattgataaagattagtaggtggcaaattcttcctttagaaggttgtttgtgacccaagagggcatcaatacaaagaccctaaagctgggattccgaagcacagagtcgcgggagagaaccaaagctcatcgcatctggtttaagactccttcagagttggatcagcctaaaaacaggacatggtacaagattttattcattccaaagattgtaaaaattaaattcatcctgagaatttatcagtctatgtgggagctacagacttctatgagcaagcagaggtaagtaatgttctaacttcaactaaaagaggctaagagatcatcttccttcttttgaatttaatttttttattattattttaaaagacagggtcttgccctaccacccaggctgctcttgaacccctaacctcaagctgtcctcctgcctcagcctcccaaagcattgggattacaggcatgtgtcgtgcctggcctcaccctccttgagatttcagaattgttgacagaatgacaataagtaggattcactgtctccttaaagactgaggaaagaaacccagtgaaacctctgatggacaatggcctcagttaactaggacagtaactgtacagtatccatctcctaatccagtaaaactgagttacatatagaaaggcttgaaagaagcaaagccatagatttatatttctgtattaataaggaatctatgcatatttttggtcttatatatacttgaagtgtgttagagtatgtggctgttttaagtacattcttataactaatttgaaatgggtacttctatattgaaatcttactgagtttatgaatagtattgaaacatctaagggaatattattaggtttgccatattaatatactgaatctgctagattgataagaattacataatcaggccactgaaatgtataaaaaggaaatttaatttaaaaaggacttgggggcagacacagtggctcatgcctgtaatcccaacagtttgggaggccaaagtgggaggatcatttgagtccagaagttcatgaccagcgtgggcaacacagggaaaccccatctctatgaaaaaaaaaacaaaacatttttttaaattagccaagcatggtggtgcatgcctgtggtgacagcttctcgggaggctgaggtaggaggatcacttgagcccagaaggtcaaggcttcagtgagctgtgatcgcaccactggtctccagcctcagcgacagagaaagaccctgtctttttttttttttttttttttttttagcagctctggaatgagaataggtatttgtaacacacataactgataaaggattcatatctagaatatacaaagaactccaaatcaatgaggaaaagtcagaaaaccaaaaaaggaggacagctaaagctgaaaaagcacttcaaaaacagactgtacccagctgtctgataaatatgaaaaagtatgcagtctcaaagtaggtccaaattaagaccttcatgagaattggtatacacccatcggtttggcagaaatccccttctcaagccctggaattctgggctctacccccattgctcaaagatctgaccattttccatttccatcccttccatctttctgcagtacctggcattcctgaccatgctatttctaccaatcaacaaaaactactagatactcagaggggatttaatacagagagctggctacaacatgacaaaacaccagacaagggagggcactgtggctcatgcctgtaatcccggcacttcgggaggccaaggcgggtggatcacctgaggtcaggagtttgagatcagctagccaacatggtgaaaccccgtctctactaaaaatacaaaaaattagccgggcatggtggcaggcacctgtaatcccagctacttgggaggctgaggcaggagaatcgcttgaacctgggaggcggaggttgcagtgagccaagatcatgcccttgcactccagcctgggcaacaagagtgaaactccgtctgaaataaataaataaataaacaaacggacacacaccacagaagggacagtgaggcaacccagggaatagaaagagcagaagccgcgaccctctgtagggctgagggcacacaacacaggtcaagttaccgtcgcccgggatccagggtcccctggtggaagctggaacccacagatcagtgctgtgggagatggagccacagagaaacaactgctgctggagacatcagcaggggaagaaggcggaaaaatactgtagccgctccacacctccagcccaacgccccatggcggaacttcactagaggccccacggcagaagagcctccaggaacctccttgtggaccagaggagagagatagagaggcggcaggaggcaagggtgtgtctaagacaaacaggccacagccagcccctggccttcctgaaactcctcccttgggttcttttaaaattcaatattctgcttctgttccagggttaatgggctgaactgtgtccccccaaattctaatgttgaagttctaacccccagtacctcagaatgggactgcatcaggagacaggtactttaaaatagtcattaaggtaaaatgaggtcaccacctaatctgttatgactggtatccttataaggataaaatagtcattaaggtgaaatgaggtcatcacctaatctgttatgactggtatccttataaggagaggagactagacacagacatgcacagggggacaatcctgtaaggacaaagggagaagacagccatctccaagccaaggagagaggcctcaggagaaaccaaccccgcccacaccttcatcttggacttctagcttccagaactggggaaatgaatttctgttgttgaagccccagtctgcaatacttagttatagcagcccttgcgaaccagcacatccaagttctccgtctctgtctctaacccctctctcaactgtcggccataagtgagcctctgcccccaacttctggcctcctctatgttctcttccttggtgacctctggcagtgacgctcagtcctcatggccagctctggcctctcccaggctctggcgccgcaatcatctcttccacttgtctctgcttggatagtctgtcagcatctcaaaggcaacatgaataaaaccaaatgcattttttcctcccacaaattatctctttatcctgatttctcttatctctgttcatgacttgttcaccttttcactaggacccagaattcatgcatcttggagtcccaacttctccagcccctgtgtcttgtttatttccatagcagttggtaggcgggacctctgcacagtctcacatggtcccttctttctagtccaggcccagctcagccctcaccagaacaggcactagcacgacagcctgctggatgattcccggtgcccgtcccctgtttcccacggttctgcctcatccagcacactctgcacttgactgcctaaagcacagcgctcatcccatcactcctgcttctcaaactcctgcagtgcctgcccccaccccagaaagtgcaggcagtcttgcctggcattcaagaccttccactgagcctaagcaacatagtgagaccccatctctacaaaaaatttaaaaattagccaggcatggtggcacgtgcctatagccccagctacttgggaggctgaggcgggagaactgctggagcccgggagttccaggatgtagtgatccatgttcataccactgcactccagcctgggcaacagaagagaccccatctctaaaaagaaaagaaaaagaccttccattggacccacctaaccgggtctccctcattggcagccattcacttattccacgttcattctgcacctcctgcacacgaggtgctatgccaattactggatacatttaatccctcaacaactctgcatggtgaccattattgtccccatcttgcaaaggaagaaactgaattttagaacagttgaattttagaacttgagctcccataattaggtggggaaactgatgtttgaatttgtgtccttttggccccaaagtccttctctggataaactaggcaaccaagagcaaagaatgctctatacccgacaaaaatagaaatgaaactcaagatccaagacgcaagagtggcagaaggttcaaggtgcaccactgccagccctgacagcctttgtatccaggtcagttgaacaggccgggattgtccccaacttggacacatctaaaaagctgcaggtgggatgtcatcaaaatcacctgggaaaacaacctgctctgaaaacagaggcatgatccaaaagacaaagaggtttgtgataccctttctgtacaatagctgactatcagtaagtcattactgttttaaggaagtcagtcacacacacacacacacgcatacacacacagaaaaatacaagttagctgggcgtggtggtgtgcacctgcaatcccagctactcgggaggctgaggcagcagaatcatttgaacccgggaggcagaggttgcagtgatccaagattgcatcactacactccagcctgggcaacagagccagactgtctcaaaaaataaataacaataataataataatgttgcaccaatgtcagttttggtaaatccatggttgtgtaagatgttagcattagaggaagctgggtgaagtttcaaagaactctctgtactatttctcttttgtaagcctaaaattatttcaaaataataggtgataaaaattagaaggtgacattccactgaatttcatcagcactccttttttcccctcttccgaaccagccatgtgatcttaagcaaattatctcatctctctaggtcacagtttttcaacttaggaaaaaaaaagagggacacaagccagatcatctctaacttcccctccatctctcaaattctgtggtcctcgtacatttacaatatgatgcaatctacaaacatttgatattggtgctctcttattcaccttcatatccctggtatttagcattgtgcctatacatagtaggtgctcactgaaagtttttgcaactacctcaaaaactgaggttcatacctcagtttgtaaagtgacgtagaactgctagctcttttacctagttgaccactagagagcgaagcggtcacaaattttttctctgttaaaagcaaatttatcttcgtccagcagaggggagtggtcctttatatttcaggcatgtaaaaatcaggtcctggttgggcgaagggagaaatctgtgagcagtttcctgcctatcagacaggccctccagaggggtgatcagtaccataagcttccaggtaagcacatggggccactgcccccaccctccaaaacaccctcaaaagtctaaaccacctcaatggatgggagattgctctgcaaatgggggagccccactcctaatatgttcatcattgtcttcctaacaatcgtgactcatttcttgaacaaatgtttcacttttaaagggtttgcacagaggcagctttaagaggtcaaataaatgaatgtggaaagaaattaaaacttttacaaccacatgaaaaaggcattagccagtcatcctgcccagcagcccaatattgagcctgtgtgagttgccgtttgtgtagtgaagcaatagaggccatggtctggaatcagaaaccctgggttcagatactgcctctgaccccccaactccccaacaaaatgcacacattcagtggccatgtgaccagggcaaatgcctctcgttccacagctccaatgcaggaataataatagcatccacctggtgtgggtgggcgggttcacagagaacagccacacaggctaagagtgcagactattgtgacccagcaactgcccacctgggcagagtgaacaggaagggaatagaagggcaacgcgctttcacttcatcctcatgagcgctcttcgtggggaaactattacacaaagtcggggtggggagttccttcccagtaaatcgagttgcctttttcaggcacggaaaagcccatctgcctgaattttcctcaactggtcaatcatggtgccagaaatcccaaccacttgaagtgctccttcaggttaagttactttatctgccaactgtgttagtttaaacaagtcagtttccaagtcctacgctgctgcttttatcatcccattaatttataaaactaagaataggggccaaacgcggtggttcatgcctgtaatcccagcactttgggagatcaaggcgggtggatcacctgaggtcaggagttcgagaccagcctggccaacatggtgaaaccccatctctactaaaaatacaaaaaattagccaggcatggtggtgcaacgtagtcccagctgctcaggaggctgaggcaagagaatcacttgaatccaggaaacagaggttgcagtgagccaagattgtgccactgcactccagcctgggcgacagagcaagactcccacctcaaacaaaaaaaaaaaaagaaaattaagaataggaccccacagtgtgggaaggaggctggaagcgtcctgattaaactgcagcctgaggactgctgggtgggatcctgtagagcacactgagccctgagaagggggcaagaagagccccagggtgcaaggccagagactagctggggcagagaagagtgcgaagctggcaggactgaagggtcgggagacccttaaagagaccctgtagcagacgccttgggaatgtacgtgtcaccgagcaaagcacatgaagagaactgttcaacagcggactcagctgggaactccagacactgcggcaaaaccagcacagatgcatcctctcctgtggctaaaagctccatgaggggccagtgagtcacatgacaaccgaatttctcctctgccaatctgaacatattctgggactgagacttccgtactcagggaaaaccaatcacactgcttaaaagaaaaaaaaattggccaggtgcggtggctcacgcctgtaatcccagcactttgggaggctgaggcgggcagatcatgaggtcaggagattgagaccatcctggctaacacagtgaaaccccgtctctactaaaaattcaaaaaaaaattagccgggcatgatggcgggcgcctgtagtcccagctactggggaggctgaggcaggagaatagcatgaacccaggaggcggagcttgcagtgagccaagatcgcgccactgccctccaggcctgggtgacagagcaagactcagtctcaaaaaaaaaaaaaaaagaaagaaagaaaaaaactacctattataaacccttgatgctataaatttaatggagctggaaataaattccctggaaagactatggtgggagaaggggggcattaccttcatccgtttacattctccagccatgggaactagctcctttgttttcactgaatttatgtttctatagaggcacccaggattgagtctcctataggggggtcccatgaagctgccatgcccctctgttgatacaccttgctttgcaggtcaatttgtgatttttaaaatggttttatgcaaacgacatgtttagcccaaatgcactgcaggtagctggtgataaaacagcaatacggaccaggcacagtggctcacacctataatgccagcactttgagaggccaaagcagaaggatcacttcaggccaggagtttgagaccggtctttgcaacatagggagactccatctgtacagaaaattaaaaattagccaggcggccaggtgtggtggctcacgcctgtaatcctaacactttgggaggcaaaagcgggcaaatcacttgaactcaagttcaagaccagcctgggcaacatggtgaaaccacatctctacaaaagtaaagaaaattagccaggcatggtggtgtgtgcctgtagttccagctactcctggggaggtcgaggctgcagtgagccgcaatcacgccacttgtactccagcctgggcgacagagcaagtccccatctcaaaaaaaaaaaaaaaaaaaaaaaaaaaaggctgggtgtggtggtcccagatactcagaggctgaaaagggaggattgcttgagcccaggagttcaaggctgcagtgagctgcgatcacatcaatgcactccatccagcctgagcaatggagtgagaccctgactatatttaaaaaaaaaaaaaataggaagaaacaactcaaccacagggctagtatgttactcggttataaaatgataaagccctaaacagagaattagcccgtttccagaagaggccaagaacagatgatacagctgaactgaactcctgcctgtacagctcgttttctacaagattccagacctggaagatgatggcatccagcccccattgaagcacctcgaacaagaaaaacgccgagtccgaagagccaggccttgaacacacgattcctgtctataaataactccccctggggaataaaaagcaggatccaaggcaggaaacccgagccgtggaatctggtaagttcttaggaaacccactcacgggcctgagtcccccgtggaagcggcgacttcggcacctggacacccgagtccccagagccccgggcggccgcgcgtccctacctgcaggcctgataccggccgcggagcgctcctggccccgctcccgccaggctccgggaccgctgaaacgcacccaggggggtgaaggcgtagtcgccaaggacagcgcagatggcagcggaggcatgggagccggaacctaccgtggcaaagggccaggtcgggacgcccctcggcgcagccccaaatcctgcccgcgccccagccccgctcaggccgcgcccctgccacctctggccacacgggctgagacgtctggctcctgcacagcgcacttcccgctgcccttctccactggctgctcaggccctgcctcgccagcacggcatccgcgggggatccctacctgtcctttagggcttgcctcataggtcaaacgtcacctcccagggaggtatggcctgccccctggccaggtgggccccttccacgctcgcctgcaacaccacccacccaccttgataactgcttgtaaaggttgtactgctttcccccttgagactgcaaaccttcaagggcaggaaatgggtctgttttcctggcaaaataatgaagttggcttaaggttttgctgaataaaatgagtgacagacaaaagtagccaaatttggcactcctgatgggttatttgatgaaggaggtgcaatgtatgggcttaactagttattctggatttctttccccatgttactcctccctaattctgatgaggaactgagagctgaatctattaatctattaactcttaaccttcctttttttttttttttttttttttgagacggagtctcactctgtcacccagcctggagtgcagtggcacgatcttggctcactataacctccgcctcccaggttcaagtgattctcctgcctcagcctcttaagtattgggattacaggcgcccgccaccatgtccagataatttttgtatttttagtagagacagtgtttcaccatgttggccaggctagtctcaaactcctgacctcaggtgatccacccacctcagcctcccaaagtgctggggttacagctgtaagccactgcatccggccttaaccttccttttctaaaggcactaccagacttctcctgctaccctaaggatggagtcctaattctgccactggaaccctgaatgcttcactttcagcacaaaaatttcaagcaaagacttgcagcctctccttctcagtttaggggaatgggggaattctttaatctgtggtgggacacacatgatgttaattagaatactctctcccaaagaggaggaaataaataggaaaatgaatcaagtctgatgcccgggaagtgtttatggatgttgtgcagaatagccctaccacaaagaaaatttcaaatgagacatcctatcactgctggggtttctcataacacaagagctgaggctaggtatggttgttttttttttcttgctttataagaatattattcaataagcagatttccaagccttgcattctttctattcaatgtttctaagattcacacatacaatttcgcaaagctgcattttattcatgttcactgctatctaatattctatttgtgatcatatcctactttgtttagccattctcctggggatcaacatggggttatctccagtttgtttcctctaacaaataatattgttctgaacatccactcgtctcctggagcccctgggcaagcatttctctgggtgtggacccattactacaccaggcatacgtccagcaagctaattaatgtgcagaattaagagataatgctaaactgttttccaaagcagttataccaatgtacactcccattaaaagtgacttttgtttttgactcggtatttttcaggtcaaacacattttcctttcaattttagatttatactgattttcacaaactgtcttggagaattatgaggtcctcaaacacaaagcttcatattgtggttcttagtcaagaaaatctcctagaggcaatgatccagctaattacagatcccctattgtccacgtctaaatttacgcattgtagctgggattagacccatgaatcctaggacaatgccaggggtgtcattaacttaaaaactctggcaggccaagtgcagtggatcacgcctgtaatcctagcactttgggagaccgaggcaggtggatcacgaggtcaggagttgaagaccagcctggccaagatggtgaaaccccatctctactaaaaatacaaaaattagccagccatggtggcacgcacctgtaatcccagctactcgggaagctgaggcagagaattgcttaaacccagaaggcggaggcggaggttgcagtgagccgagattgtgccaatgcactacagcctgggcgacacagcgagactccgtctcaaaaaaaaaacaaaaacaaaaacaaaaaaactctggcgtaagcatggtgtggagagtgtctgcagtgatatgagaatcctgggcacaacagcataagcagctgccttcagaatctaccgctcttgcctcccacggtccatacaacctcttttttattttcttcttttttaatgtttgtttatttatttatttaatgagacagagtctcactctgtcacccaagctggagtgcagaagcacgatcttggctcactgcaacccccgcctcctgggttcaagtgattctcctgcctcagcctccgaagtagctaggactacaggtgcccaccaccacacccagctaatttttgtatttttagtagagatggggtttcactatgttggccaggctggtctcgaacccctgacctcaagtgacccgcccacctcgacctcccaaagtgctaggattacaggcacgagccactgcgcccagcctgtgaaggctttaatagcaacaatccttataaaaatgatttttttggccgggcgcagtggctcacgcctgtaatcccaacactttgggaggctgaggcgggcagatcacgaggtcaggagatcgagaccatcctggttaacatggtgaaacccagtctctactaaaaatacaaaaaattagcccggcgtggtggcgggcacctgtagtcccaactactcaggaggctgaggcaggagaatggcgtgaacccgggaggcagagcttgcagtgagacgagatggtgtcactgcactcaagcctgggtgacgcagagagactccgtctcaaaaaaaaaaaaattttttttttttaagacagggtatatcacaggctggagtgcagtggtgctatcatagctcactgtagcctcaaactcctgtgcttaactgaccctcctgcctcagcctcccaagtagctgatactatatgcacaaaccaccattgcctgctaattatttttgtattttgtatagagatgggttcttgctatgttgcccaggctggtctcgaactcctggcctcaaacgatctaaccacctttgcctcacaaagccctagaatcatatacataagccaccacacctggccaagaatgatttttttaaattggaaaattttaaatgttcaataaggaacatattaagcaaactgtggtagagtagtccccccttatccacaagggtatgttccaagacccccagtggacgcctgaaccctatatatattgttttttcctattacttacctatgacaaagtttatacgttaggcacaataacaaattaacaactaataataaaatagggtaataataaactaataataaaattaaataaagtaagaatgactagaacacaagcactgtgataccacaacagtcgatctgatcaccaacagagctactaagtgacaaatgggagaatctgctggacaaagagatgattcgtgtcccaggtgagacagaacaggaaggtgtgagatttcatcgtgctgttccgaaccgcacacaatttaaaactcatgaattatgttctcacttctaagtgggagctcaataatgtgtacacatggacacagagagtggaataacaggcattggaggctcagaagggtggaaggggtgaacaatgagaaattacttaatgggtacaatgtacatgatcaggggtgatggctgcactcaaaatccagacttcaccacttcccaatatacccatgtaacaaaacaggggcacttgtaccctctaaatctatcaaaattaaataaacaaataaatcttatgaaatgttctggaatgttccattttatattttctttttcttgttttttttttttcatttaatattttcaaactgcagttggccacaggtaactgaaaccttggaaagcaacagcacagctaaggggacaattactatatatccattcagtggtacaaagtataactttctttccagaaccatttgagattaaattgcagaaaccatgacccttcaccctagtacttcaagctgtatttcctaagaacaagaatatttctccaacataaccacactgcaatgatcagatgcagaaaatttaacactgcaatattcagattcaggtatcagcatccatccaatgctaataactgctattcacatttagtcaattgtcccaaataacattcttgctagcagtattatttttcccaatgcaaggacacacatgtcatttagctgccatgtctctttattcccttttaatctggaatagttccttagtctttcatgaccttgacatcttttaaaagtcagccccggctgggcgcggtggctcacgcctgtaatcccagcactttgggaggccaaggcgggcggatcacttgaggtcaggagtttgagatcatcctggccaacatggtgaaaccccgtctctactaaaaatacaaaaattcgctgggcacggtggctcacgcctgtaatcccagcactttgggaggccgaggcgggcagatcacgagatcaagagatcgagaccatcctggccaaagtagtaaaaccccatctctactaaaaatacaaaaattagctgggcgtggtagtgcacacctgtagtcccaggtactcaggaggctgaggcaggagaatcgcttggacctgggaggtggaggttgcagtgagccaagatcgggccactgcactccagcctgggtgacagagtgagacttggtcttggggaaaaaaaaaaaaaaagttagccccattatattgcagctggtccctcaatttgtgtttgtctaatgtttcctaaatccaattcaggttatgcatttttggcacaggatgtcagttcaaattgatgacgctgactttgttcacatggttaaggtggtttccagaagaaccactataaaggttccttgtatatgtttgtaattcatacgtaatctgtggagtgaggctttggcatcttattccccagtgctatggtttgaatgtattccccaagtgcatgtgttggaaatgtaatccccagtgcaacagtgttgagaggtgggtgatttggtcataaaggctctgctgttattgcgggagtgggctcctgataaagggatgagtttggccccttcctttctctttcccttgctcaccctcttgcccttctgctttccaccatgagatgatgcagccagaaggccctcaccagatgtggctcctcaatcttggacttcccagcctccagaaccataaggcaaatacatttctgttcattataaattacccagtctcaggtattctgttacggaagcataaaacagaccaagacacccagtaagcgcccacctgaatgagtcatgactgtgttagttgcaatgtggtaacttttcgtttgttttttggtttttgagatggagtttcactcattgcccaggctggagtgcaatggtgcgatctcagctcaccacaacctccgcctcccgggttcaagtcattctcctgcctcagcctcctgagtagctgggattacaggcatgtaccaccatgcccagctaattttgtatttttagtagagacagggtttctccatgttggtcaggctcaggtgatccacccgacctcaggtgatccacccgccttggcctcccaaagtgctgggactacaggcatgagccactatacccggcctacaatgtggtaacgttttctgtatgattagtcaaatgcagtagtgagaagggggaaaagaataaaacaaagagttcaatctgtaactgaccatgaacaatcaattgagataacttgctaccttcagactagccaacttttccaactctgttgttccttcagcaatcattagctggcattctcctcttctacctctgtttatgtatttgttggtaagtttatttgctttttagtatgactctggactcatggattctcttttattcaacgtgataattcattattgccattattaattttgatattcaaattgttccaggtttggccactggagccccatcaagctgacccctgtgtccttctgacctgtctctatcattctttgagcacctccttgtgttttgaacaagccgctcctgactcatcgttgaccttccctccccttcccacaatgagccatttctcctaggagctctgactccttttaatggacaatggtatttagaaaacaagatatgggcatgaggaatgctcattgctacttgggtggccctgctccccagctctctcagcagacagatcttagaaataactcaagtcaaaatgaaaagcaggacaggcgcagtggctcactcctgtaatcccagcactttgtgaggctgaggtgggcagatcacttgaggccaggagttcgagaccagcatggctagcatggtgaaaccctgtctctactaaaaatacaaaaattagccaggtgtggtggtgcgtgcctgtaatcccagctactcaggaggctgaggcagaagaattgtctgaacctgggaggcagaggttgcagtgagccgagatcacaccactgcactccagcctgggcaacagagcgagactctgtctccaaaaaaacgaaaagttgtgttatccaccaagtttccaagtttctccactataaaggttccttttttatctttgtaattaataagtaatctgtggaatctctcattccaattcatggagctcttctttgccttccttcactccatatttttatctttcttctctcatagtgaggatcccagctcccaagaatatcattatatttacttatttgtttaatcctacaatacacagaaaatattttcagaattgctataccagatcactaccaactaagtgaagtacaaaatttctttgtagttttgtttgtttacacacaggtggatagtcaaagagctgtgttcaaagttatttgagtttgcctttctatgactaatttactatgcagtttagctcatttgttcacttctgtttgtattcaattttaggtttcctttcccccatcttatgttgatttagtttttctttttaaatactaaaacattaacatgttttgaaaagtcaaaactgcccccaaaaaaggtatgcctggagatgtgtcatttcctcttagactttcaccccattctcatccacccactgcaagtagccaatttattagtttctagttttttcttcctaggtttcttttttcccttttctctttttctttccaaaaataaggagatacttgaatgtttcacacaaaaagtagcctaacacagtactctctgtttaacttttgttcacttcctagtactgtataccctagaaatcactccacatcagttcagagaccttcctcactgttttttatacgtgcattgtgtggatgtaccagggtttattcacccaattgcctatgtattggcactgaagttgtttccaaaattttgccattgcaaacaatgctgcaatgagtgaccttgtacatatatacacttttatactggtgtaggcgtttctccagagtaaattcctacctgtagaattgctgggtcaaggggtaaatgcatatgtagttttgttaaacaatgctaaatgttcctctctaggagttggaccatcttgcattcccaccagcaatgtatgagagcatctgttaccccacagactgtcctgttgctttgcacttagcaacgggatcagttagaaccgtgatggtatctcagagtaccctgcatttctcctcctatgggagaaacggaacatcttttcattgaagggccagttttatgtcatttttgtgcagattgtcagttcatgttttttgcctatttggtctttgcttccctcaatgtttgagttatttacatacttgggatcttaaccctttatctgtgatagatgttgcaaatattttttcccagtttgacatctgtctttaatcaatggtaggggatttttttttctttttccttttaattttattttattttatttatttatttatttattttttttgagacagggtctcactccctcacccaggctggagtgcagagccgccatctctgctgacagcaagctctgcctccctggctaaagcaatcctcccacctcagcctccggagtagctgaaacgaacttttcttattttttgcagaggggttttcgccatgttggccaggctggtctccaactcctgaactcaaagagattctcccacctaggcctcccagcgtgctgggattacaggcgtgagccacagtgtctggcccatcttttttttttttttttttttttttaatgagacggagttcgctcttgtcgtccaggctggagtgcagcggtgcaatctcagctcactgcaacctccacctcccgagttcaagtgattctcctgcctcagcctcctgagtagctgggattacaggagcaccaccagcagcacgaccgactaatttttgttatttttagcagagacacggtttcaccatgttgcccaggctggtctcgaactcctgacctcaagtgatctgcctgcctcggcctcgcgaagtgctgagattacaagcgtgaaccaccgcgcccggccccagcttccgttttttaatgttattatgtatcagtcttttttttccgggcacttaggcgctgggtcattaggaagcctttccccacacgcaggtcctagtcaaccgtgctttttagcggcgagtaggccctgcggctctgcccctaacatgggcgcggggcacgcggccaggggcccgtgggagggggacagggcgcgcgaacccaggttctcaggccgcgtcgccgcgcgtgcgcactgacagccgggccgagccagcccgggtcccgcagggaagaacgccagcggcgcgcggaggccgcgctgccctgggccgcgaggtccctatggctgctccaccggaagccccgcccccttctggcagctggaggcggctttccggccgtcccggctgcagccccgaggcctcgactcaggagacggctgttccctggcagaggctcgcggtggactgcctgaccctcgcccggccccagcacgcccccggcgaacgcccacccctgtcccggcccgcagcgccccgacttacttctgaggccgaaacgcggccgctcctgcgccgggtggtcgcccgcgaatccctgccgcgccgcgctgcgccctctcgtggcccgcctggtggtgcaactgggctctctgcgcagggccgcggggccgcctggcctcctcctgccctggccgcggtgccgcgcgctcgggaacgcgggcctttcgccgctagccagcttctgcctctcggccacctgtcctctctcgcccacgctgcctgggaggcgcgcttctgccgccttcttgccgcgctcgctctagcctcgcccactcctgcggccttacagggccgaacctcaccctgccctgcggaaggcaggcctacaccttccctccgcgccttcctccctgaccggcaccaaacaccacgttgccctttccagcatcgacgacctattccccagttctctgacaccagctgaattagcgcgaaactactggttaagggattagcccagggagactgccctcccttcgccagccacaagcggggtgcccagaatgcccgcatttctaccctgcccactagaaactgagggattgccacagctcccgtgaggttcagcaattccctgggacgacacagaactcagggagacactttactgttagaagattattgtaaagaacacaactcggtaacagccgagtgcaagagatgcgcagcacggggggtgaagggcgggagtgctgtcctcacagcacctctgtgtgcccacctgcctggaagctctccgaaccctgtttaagagatttttatccaggtttcattatgtcattggccattagtgattgaattcaacctccagcccctttcccttcccgcaagaggagtagggacatgttggagctgaatgaaagttacaaccctctgatcacatggtgtgttgcaccagccccaccctgaatccatcctagagcccgcaattagccacctcattagtagaaactgtgatttgactaagggagtcattatgaataacaaaaacactcctattgcctaggaaattccaaggggtttaggagttctgtgtcaggaactggggacaaagaccaaatagattttttataccaaactccctaaaccaataacccagtttaatcgtgagaaaaacatcagacaaatcccagcagagggacattgtacaaaatagccaacctaaaatcggtcaaggttgtgaatgtggtcagaatcaaaatggtggagtcatttgtgttaaaagagagagaaaaaaaaaatgacaaatagagctggggaaagccatgaagaggattcttgttcctaaatgcgtgatgtcacaaatgctcataaaagatcaacactgtccacagaggccatgtcagccttcccaaaagaagattcctgccaggacatctgcccagcaatagcctgtccaacttcagactggtatcaccctgatcgatacttgtagctgaggctaattatcaaaaacaatatgtaatcctcctcattttttctttaaaaatcttggtcttcctttacctccctgaatttcacacacatagcttaaaatggcccacatggctccattgcaatgccctgttcccaaataaataccattttcttttagagaacctctctgttatggaggttgacaaggtcaccaaaaccaaagagagtgtgaggaactgcctcagccaagaggcatctaaggagacatgatggttaaatgtaagtggtgtcctagatgggatcctggaacagaaaaaggacattggtagaaaatggaggaaatttaaataatgtaccaataatatcaataatataacgtaccaatgttggtttattaattgttaacaaatgtgccatactaatgtaagatacaaatatgaggaaactggtttatgggaactctctgcactatcttgcaaattatctgtaaatcttaaactattctaaaaataacgctttaaaaaaaaattagagctgagtgtcatgggcacacctgtaatcccagcactttgggaggccaaggtgggaggatcacttgggcccaagagtttcagagccagcctgggtgacacagtgagaccccatctcttaaaaaaaaaaaatagccaggcatggcagcgtgcgcctgtagtcccagctactcaggaggctgaggggggaggatctcttgagcctaggaggttgaggctgccgtgagtcaagatgacgccactgcactcctgcctgggcaacagagcaagatcttgtctcagaaaagacaagaatcataaataaataaacaagtaaactagaaataagccagatgtggtgaggcatgcctataatcagttatttgggaggctgtggtgggaggatagcttgagcccaggagtccaagaccagcctaagcaatatagcaagactccctctgaaaataaaaggaaaaacaattacaaagatttaaaagcccttcaattttgaggatccaccttctttaaacagcagagggagaaagtgtataaattgagtgacattcactggaattaggagatccggagtggaaatttccagagaaattccaaaaatcctggtgagaagaaaggaatagccatagcaggccctgagaatacagagcttcctagccaagtcaaatccgtcccatccttctcccacctccactccccctcccctggcaccaagggggtcagcagagggagcagaaaccttcagccactccccttcctgcagaccagcagccccagccctgaccacagctggctggccttggaatgaagcttgaaggactgataaatacctgggactggacgtactagtttctgaattgagaacaagtttgtgatttaaagtgatcttggccgggcgcaaatggctcacgcctgtaatccctgccctttgggaggcttaggcgggcagatcacctgaggtcgggagattgagaccagcctggccaacatagcgaacccccgtctctactaaacatacaaaaattagccaggcatggcggcttgcgcctgtaatcccagctactcaggaggctgagacaggagaatcacttgagcccaggaagtggaggttgcagtgagccaagatctcactactgcactccagcctgggcaatggagcaagactgcatctcaaaacaaacaaacaaacaaatcaataaagtgactctaagattgtccccaacctaacatgagcagaaacgttttgggtctgtgttatgagttcaattgtatcctcctaaaaaagctatgttaaagtcctaaatgctcgcatacctgagaatatgacctcctttgaaaacaaggtcgttgcagatgtaattagttaagatgaggtcacactcacctaatatgcctggtgtctttgtgataatatggacatatggcgacagagggactgggagaatgccacgtgacaacaaaggcagaggctggcccaatgctgcaaaccaccgaagcaaggaagaagcgaggaagacttgaggaaggatcccccacaggtttcagagggagcacagccctcctgccactttaattttgaacttctaggctcaagaattgcgagacaaaattctgttgttttaaggcaccccgtttgtagtactttgctgcagaggccctgagagtccaattcagccctattagctttttcatccggggcaagtgaagatactctctactggatacagatagagatggtagaagataaagctgtgtttctcacgtcctgtgagttatgcatgcaaggtaccagttactcaactgtcctgtggactaaatctctttaagggactaagggagcttaccaggcccctggtaaggaggcctaggcccataggtggtaccaaagcaaaagggacctagcacagtggtgaaaaactccagcataccttctgggaacttgccctgcagatacggtcatctgtgtgcaaaatggtgtatgtgtgtacaaggttattcactgaggcattgtttgcaataacagaaggttggaaaccactacatatccaataggtatggaaggcaaataagtatttgtactccatgcgctattaagactgtgcagcttggccgggcatggtggctcatgcctgtaatcccagcactttgggaggccgaggtgggtggatcacgaggtcgggggttcgagaccagtctgatcaacacggtgaaacccccatctctactaaaaatacaaaaaactggccaggctggtggcgcgcgcctgtaatcccagctacgtgggaggctgaggcaggagaatcgcttgaacccgggaagcggaggttgcagtgagctgagatagcgccactgcactccagcctgggcgacagagcgagactccgtctcagaaacaaaccaaccaacaaaaaaaccgtgcagctcttaaaaactgggaggaagcgacgcccagcaagacggcggcagcgcagcgcgtgtgttgttgaggatccaggacgctggcccgcgggcgtcttggtcttcttcaccgctgcgaaatcgcgtcacctaccgctactggcggattcgggaggtgctgaagcacgccaagcacttccggcgggggagcggggtgcgggggaaattgctgctacaggttggcggtcagagccgggactggagcctttgtgaaatgcaccaaagccggaaacctgaagaagaggaccatgaggaccctctggattaatcgaattacagctgctacccaggaacacggcccgaagtacccagcgttcactggcaatttaattaagtgccaggtgaagcgccacaagaaagtcccagcgaatctggccatctacgaaccagagacttttaaatctttggctgccttggccaataggaggcgacaggaagaatttgctgctgccttaggagatgggaaggcagcatatttttccagaatggtacagtaccgctgaggaccgttgctgtattgactaggaaaagacacagagtaatttgcattttatttgatttgtgcttgtgtttatccacattcgagtaacaggcatgagggaaggccccttctctctgggacagagcctcacagatggcttccgtgtttcgtgtgaatgaaactcaaacattgttcgaaaaaaaaaaaattgggaggaagcaagaaagaaaaagagtaagggacctgtttgtatactaatagagaaatagaaatatctggaatacagtaacctcccttttgtgtaaaaggcagggaggctgataagaaaataatataactgtatttcggccgggtggagtggctcacgtctgtaatcccagcactttgggggccacggcgggtggatctcttgagagcaggagtttgagaccagcctgggcaatacggtaaaaccccgtctctactaaaattacaaaaattagccagtgtggtgatgcacacatgtaatcccagctactcaggaggttgaggcatgagaatcgcttgaacccgggaggcggaggttgcagtgagcagaaatcacgccactgcactccagtctgggcgacagagcaagactctgtcttgaaaaataaaataaaatacataaaaaagataaaataaaataaagaatataaaatgcacttattgtctattatgtactggacattgttctatcagtacacagccaagggtgaaataggccatggctagaagtgaacaaagttatttactcacagaaaatgggcagtgggctaggcatatttactcatctttatttcaaacgttagaaaagaattcctgtacatttctaggagccatagatgcccaggataccaatgcttttacttcctcacattcttcatgcttctgtagccgcagagcaaaatatagatagtgttttctataggtacactataagaacccagagaggcagaggaaactggatgggtctgaattccaacccatcagaacagaagctaagtttcagtgtgacccacagcctgactagttttcattcaggattggtctttcagttccaggccgggagcatggtggctcatgcctgtaatcccaggactttgggaagctgaggcgggaggatcaattgagtccgggagtttgagaccaactcaggcattatagtgagactccatctctacagaaaatttaaaaagtaggcatggtggtacatacctgtagtctcaactacttgggaggctgaggtgggaggatctctcgagccaaggaggtcgaggctgcagtaagccatgatgacaccactgcactctagcctgggtgacagagcgagaccctgtctcaaaaaaaaaaaaaaaagagagaaaaagaaaaaaatgagttccacatcttgctcgcagcccattctctatgaattgagagatgacagaagatgactgtttttttgttttgttttgttttgtttttttgagatggagtctcgctctgtcaggctggagtagtgcagtggtgcaatcttggctcactgcaacctctgcctcccgggttcaagcaattctgcctcagcctcctgagtagctgggattacaggtgtgcaccaccacgcctggctaatttttatatttttagtagagacagggtttcaccatgttggccaggatgttgtcaatctcctgacctcatgatccacccacctcagcctcccaaagtgctgggattacaggcgtgagccaccgcacccagcctggatgactttttaaccatgtgtttgtgatcttctccatggcctctgctgctcagcttattaataggttggttggccatctacaatttatctttcatgtctttcccccagaaagccagtgtacctgtgatgggagatcaatcctgacagctcacagaacgagtctggtcttctgtggagcacacctgctaagtcccagactctgcagcaagcctggctggcttcacatcacactcctgatcttcggggtgactttgaagtaatgattgagcttctctatgacttggtttcctctcctcaaaatatggataacctactttctctcttacatgcttattgtcaggactgagtaaattaaaatccacaaaccacagtcctggcacacagtacatgctcaataaatgttaaagttatagttactacagtagctattattaatgcagtggacatgtctccgcctcagcttccattatcttgtctgcaaaatgaaaagatgaaccaggaatgagactgaagttctcttctagctctgagatctgtaggtctggctttcctgatttgctttgtccatttttttttcccacatggcactgtatgtgcccaggcaatatgtaacgaataggagtttcttctgttttcctatagaaacaactagaagagtgaatctcattacattgacaaactcagggaccaggccaggcgcggtggctcacacctgtaatcccagcactttgggaggccgaggtggatggatcacttgaggccaggagtttgagaccagcctgtgcaacatggtgaaaccccgtctctactgaaaagacaaaaatagccaggtgtggtggtgcgcacctgtagtcccagctactcaggaggctgaggcaggagaatagcttgaaccaggagatggaggttgcagtgagctgagaccacagcactgcacaccagtctgggcaacagagtgaaactacggctcaaaaaaaaatgaccacacactgggcggtttacaacaacagcagtgtcttgtctcacagctctggggcctgaagtctgaaacccaggtgcctgcagcgttgtttccttgaagaggctctcggggagaatcagtcccatgcccctctccctctccttgcatctgatgttgccagcagaccttgtgttccttggctcctagaggcttcactccagtctctgtgtctgtcttctcatggctgtcttctccgtgtgtctctgtgtttccaatctccttccgcctttttcttatgaggacgcctgtcattggatttaggttccaccctgtgttagtctgttttgtgctgctgtaatacaatgccagagactaggtaatgataaaaaaaaaaaaaaaggaaatggatttcatacaattctagaggctaggaagcccaaggtcaaggcactggtaggattggtgtctggtgagggcctggtctctgcttccaagatggtgccttgaatacggggaggaacgctgttccttacaaagcaaaagggtataagagtgagaacccactcctgacagccttttttttaagggcattaaacccatccatgagggcagaactctcatggcctaatcacctgttaaaggccccacctcccaataccattacattgaaaattaaatttcaacaacagtttgggagaggacaaatatccaatccatagtacaccctaaatccagaatgatctcctctcaagatccctgctaccacctccttctcctccttctcctcctcctcttccttctcctccttctgcttcttattgttgttattttagagacagggtcttgctttatctcccaagctagagtgcagtggtgcgatcatagcttactgcagcctccaacccctgggctcaagtgatccttccacctcagcctcccgagtagctgggactacagttgtgtaccaacatgcctggctaggagtctctaatttaattgcatctgccaagcctctttttccaagtaaggtcacattcacaggttctggggggcagggcttagacatagatttttgggggccactgcttaatgtactgtaggagggccacatcctgtgtactacagggacagcctgaggtgagattctgctacctaccacgtgccacctgtggataaaactttctgctttccgtgttttctcatggtgggtgttagctcaaagtacataattaaattggacgactccatagtacttcttcattttcttctgaagctagctgagcagtgactgaaacagaggaaacccctgccctcatggaactgacacactcctaggaaaggcagacaacaagtaaaacaaataggtaagagacagtaggacaggcacagtggctcacgcctgtgctcccagcactttgggaggcttaggtgggtgaactgctaaagcttaggaattccaggccagcctgggtaatgtggcaaaaccacttctctacaaaaaaattcaaaaattagccaggtgtggtggtgtacacctgtagtcccagttgctcgggaggctgaggcaggaggatcgcttgagcccaggaggttgaggctgcagtgagccctgattgcaccactgcattccagcctgggtgacagagcgagaccctgtcttaaaagaaatagtaggttaaatgagttaaggtgatagatatatgaaaaatatggttatgttaaatgtaatggagaaaactgaagcagggaaggaggctagggaatgccacggtacacgtgtctttgtgagtgtgaaggagagagaggctttaaacaggtgtccagagaaggcgtcatccccggaggagatcggagtcagacctgaaggaggtgaggtggcaggccatgcagacgtctggaaggacagtgttgcaggcagaggccctgagacatgaatgtgcctgggaggctcccaggccagaaacagtccagagggaagggggtctgtggggagtggggtagggaaggtaaagccagggctatagatggttccagcttccagacatcagtcatggcatggttaagctagggatgtctgcagtcatgcagaaacgcttcttcttcttcttcttttttttttttctttttgagtttgagttttactcttgttgcccaggttagagtgcaatggtgcaatcttggctcatcagagcctccgtctcccgggttcaaatgattctcctgcctcagcctcccaagtagctgggattacaggcgtgcaccaccatgcccagctaattaacttttttcttttattttcttttttctttttcttgagacggaatcttgctcttgttgcccaggctagagtgcaatggcgtgatcttggctcaccgcaacctccgcctcccgggttcaagcgattctcctgcctcagcctcccaagtagctgagattacaggtatgcgccaccatgcctggctaattttgtatttttagtagagacagggtttctccatgttggtcaggctggtctcaaactcccgaccttaggtgatcctcctgcctcagcctcccaaagtgctggaattacaggcgtgagccaccgcgcctggccttttttttttcccgaaagctaacgtgggccttaacataaggattcaaaaacaggtatatttcacctaacaattctatttctgagaatatatccaaaagaactgacagcaggtgcttgaaggaatggtgttcatagtgcattattcacaacagccagaaggtggaagcaactcaagtgtccatctactgaggatgaatggataaacaaaatgtggtctctgcacacaagggaatattactcagcctgaaaaaggaaagaaattctaagctatactacaatatggatgaaccttatgggtattatgctgagtgcaataaatccgccaagaaaggcaaatactcacagattccacttatatgaggtacctataattctcaaactcacgaggacagaaagaatggtggctgccagggcctggcaaagggggaagtgggaagttactgttgaagagtttcagctttgcaagatgaagagttctctgggtagatggtggtgatgggagcacagcagcatgagtgtacctaatgctgctaaactgtgcacctcaaatggtaaagatgctagattccatgttacgtgtattttaccacaattgtaaaaaataaaaataaataacttttggctggacatggtggttcacacctgtagtcccagcattttgggaggccgaggcgggcagatctcttgaggtcaggagtttgagaccagtctaaacaacatgatgagaccccgtttctactaaaaatacaaaaattagctgggtgtggtggcacacccctgtaatcccagctactcaggaggctgaggcatgagaattgcttgaacccgggaggcagaggttgccatgagccgagattgcgccactgcactccagccggtgtgacagaatgacactccatctcaaacaaaacaaaacaaacaaacaaaaaacttaaaaaaaaaacaccccaaacaaatatatctcttattcccatggaacaaatatacaaatatccttttttggtcttaaatattttagaaaataacaacatcaaaagcagtaacaacctcttgtagcttctaaaacagctttcagagttgcagaacacttaggagcagataacaggaaatacggtctaactaaacagaagaaaaggaaattatcatttccctgcttgtcttcagcactgtttatgtaaaaatattctgacctcttagatgttctgagttttgggatcctcttcctaggcaggccggaaaccttcagggctgacatctttactttttgtttccaggcaacagtggagagtcagcatatgaaaaagaatttttaattaaagacagcaggagaagaaatagaatctccattttatttaactcccgggcagagagggtttcacacacttgaagttcagcaatttttcccagtttataagccaggggcctaattaagtttcttaagatttctaccccttccccaaattacttcctctattataaagacctcccatggactcaaacaaagtttaagaaatagtttaaaatacttggtaacacaaaaggtctttgaattcccaactacctcaatggcaatttattttgttcactgtattttaattcctgcacctgcaaaagaaaaactaaaaaacaaacaaacaaaaaactctcattttacattaccagtaaatttatttttcattaaacacattttcaacaaaaacacgcataattatggattttaattatggtttatgtagctacattctacctccccgaggacagattatccacataaattatttggaattcttctactaaggaaatttgtctattctccccatattttcaattattcaatatttactgatatcaatataagctcaagagtatttattttatacctcgagttataaacaaatattactttattttgttgctcaaattgtcccagctttggccatggtggtcttatattgtacttggccgaaggaaaaaaaaaagagagagaaaatagactgtctactgcctgcaggtgctgagtttggtctttttgctctttaaatttatttttattttattttatatttattttttgagacagagtctcactctgtcatttgggctggtgtatagtgatgcaatcttggcttactgcaacttccacctcccgggttcgagcgattctcctgcctcagcctccggagtagctaggattacaggtgcacaccaccacgcctggctaattttttgtatttttttttttttaagtactgacagggtttcaccatgttggcctggctggtctcaaactcctgacctaatgtgatccacctgcctcggcctcgcaaagtgctgggattccagacgtgagctaccatgcccagcccttcaaatttatttttagtggcgctcactttcttttttttcttttcttttcttttttttttttttttgagacagagtctcattgtgcagtccaggctagagggcaatggtgcggtctcagctcactgcaacctctgccttccgggttcaagcgatcctcctgcctcagccctccgagtaggtgggactacaggcgtgtgccactactcccgggtaatttttgtatttttattagagacggggtttcactgtgttggccaggctggtcttgaactcctgacctcatgacccacccgccttggccttccaaactgctgggattacaggggtgagccaccgcgcctggccgtggcattcactttctacagcccaggtatctgacaggaactcgagtcctgcttctctgtaccagttacttaacctctgggaagtccagtttcttaatctgtaaactgaggataatgcctgatttgcagggttagagggaggattataaattaatgtatgctccagaaaagaccaaatgattctacctctgtgaggtgcctggaatggtcaaatgcatagatacagaaagcggaatggtggttaccaatggcagggggtggggaatgaggagttactgtttcacgggtacagagtttggtttgggatgatgaaaaagttctggagatggggggccggttgcacaacaatgtgagtggatttattgccactgaattgtacatttgaaaatggttaaaatggtaaattttatgttatgtaccttttgccacaataaaaagtaatatattcattgttgaaaatttagaaaacaagttttaaagcccctccaaatctttggtaatgtcagcactcagcaggcacttctgttttatttgtagcctttgaatatatagttcacatcctatgcatacagttttgttctttccacatggtcatgtttttcctatgctgtccaaaactctgtaaacatatttttattaactgcatactattctaccgtcatttgtttaatcattgccatatttttggacatagtttttcaacagtgtaagcagcgctctctgattaaatacatcttcattcccatttcagaatacatctacagtatagacacaagtagaattactgggacaaaaggtgaactttcatttttgttgtgctttttttgagacagggtcttagggtcttgctctgtggcccaacatggagtgcagtggcatgatcatggctcactgcagcctgcaactcctgggttcaaacagtcctcccacctcagcctcctgggtagctgggaccacaaacatgtgtcaccacacccggcctgggtgaacatttttatggcacacaatacaccttatcaaactttttcattgcattgccaccagctacctagaagacactcatttaaaaacatccacacctagccaggcgtggtggtgtacacctgtagtcctagctacttgggaggctgaggtgggaggatcatttgagcctggaaggttgaggctgcagtgagccgtgatcatgccactgcactccaacctgggcaacagggcaagactctgtctcaaaaaacaaacaaacaaaaaacacaacgaaaacaccccttctgcacccagttgcccagtgttctttcattttcttttctttttttaaaaaattatatatatatatatttgagaaaaataacagcgtctcactctgtggcccaggctgggctgcagtggtgtgatcatgtcttactgcagcctcaacttcctcgagctcaggtaatcctcccacctcagcctcctgagtagctgggaccacaggcccactccaccacgcctggttaatttttgtatttttgtagagacggggtttcaccactccggccaggctggtctggaactcttgacctcaagtgatctgcctgcctctgcttcccaaagtgtgcagattacaggattgagccaccgcgccctgcccagtgttcttgtaaaaccccattctgcatttagattaaatatggtaccttattgttgcaatatggcccactaatgttctttgcctccttctagcctcctcccattaattcccccctcttaaatgtttgcctttatttagatttaattattgttgctcaaaatcttaattaaaaaaatgtgaaaacactttaatgtctgaagttcttcgattttttttttttttttttttttgagacagagtctggctcttgttgcccaggctagagtgcactggcgcgatctcggctcactgcaacttctgcctcccgagttcaagcgattctcctgcctcagcctcccaagtagctgggattacaggcacccgccaccacacccggctatttttttgtatttttcttagtggatacggggtttcatcatgttggccaggctggtctcaaactcccgacctcaagtgatccacccgcctgggcctcccaaagtgctgggattacaggcatgaaccaccgcgccttgcggaagttcttcgatttttttttttttttttggaaagggaatctctctctgtctcccacgctggagtgcagtggcacactctcggctcactgcaacctccgcctcccagattcaagccattctcctgcctcagcctcccaagtagctgggattacaggagcctgccaccacgcccggctaatttttttatttttagtagagacgggtttcaccatattggccagactgatctcgaactcctgacttcaagtgatccatccacctgcctcggtctcccaaagtgctgggattacaggtgagaaccaccgcgcctggcctagttcttcgattttttaacatccatcacagtaacttaaattatataaagtaactacccctgaggagcccggggtagttgaaggccctccagcgccttcggtgttctgtcgcagtgctctacgtgtgaaaccgctttctcccaccctggccgtgcgctggtgatggtggcagcggcgctccagcgacgcccggggaagtgtccccagggtcgggcaaggtcgcttctgctggtcgggaggccctttctaagcctggctggggctaaccgaaggagaagcccgccgctccaggctttattaaaaattcgcattctttccaaggccgccatcggtgggaagggtgcgctcgtagcacccctcttgctcggttccattcctggccttctgtctcctggaagggtcgccgcgccccaccccacccgcttcgccacgggttcgagccctggcgtcggggcgtccgggagcccactgtccagcaccgaaggcaaggccggtgcacgcggacccgaggattcggtagatgtccccgaagacccgctgccgctctaaggcggtggaagcgagattctccggaaacccagggaatccgatgctcgcacaggaccaaagcccgaggccgcggggaccacagagggacggagaagccgggactcctcacatcccacatccggcaggggaagcccagcaggtgagcgcaggtccccccagtccccgagggagtgcgcccgacggaaacgcccctagcccgcgggcctcgctttcctctcccgggttcctgggtcacttcccgctgtctccagcccgagctcgtggccccaatccctggtacctccatcctctggtcaccccttctctggtgccccctccccgacttttctttgtcccgtccccacccttgcccgggcctgccggacccccctccttgacacccggcgccacctccttgagcttttctcgtctcctccccatccccggctccctggtcccctcccggaacttctctggtcccctccgctcctccgacccgggcttttccttcgtaccctgcggccccctccgcacccctcacggagctcctcgggtcctgccccctcccagcgcttgcccgcgccgccccgcccccgtttttaaacctggcgcgcgggtaggtgagcgcgttagcccgagtggatctaggcgcgctcgtaggccggcgccgcagcaaggggcgcgggctccgccggcaccatggagcccgaagcggcggccggagcccggaaggcgcgggggcgcggctgtcactgccccggggacgctccctggaggcctccgccaccgcgcgggccggagaggtgagggtggccccgcgccccggtggacgcgctgagaggcgtgcgcggtggcggtgcggggagcgcagcgagcgggaggctggggcgctgctgaacccccgatccccagcggagctccggagctcgacggcgacgccaagcaagctcctgagccggcagccgggttcccgggaggggcgctcagttctccggttccaacgcacagctctgaagtgcggaggcccaggatgtagctggccaggaaaggggccgacgcttccgtgtagaggagatctcagttagccagccggggacactgcagtctcgggctcctaagccagccttgcaaaggcaatctctcaccttgctactttctcggtagccgtttctgttgtccctggattgggggctcggcgttcgctgtccctgggcaccaacccttttaaagacagtaacgttgtaggaaatcaaattagccagggaggtagggaagggaccgggtaggccggatgggccaggtagccaggcaggagaaagattccctcttttttttttttttttttttttttttgagacagggtctcactgtgtcgcccaggctggagtgcaatggcgtgatctcggctcacgggaacctccgcctcccgggttcaagcgattttcctgcctcagcctcctgagtagcagggattacacgcgcctgccaccacgcccggctaatttttgtatttttagtagagactgggtttcgccatgttggccaggctggtctcgaactcctgacctcgagtgatccagtaacctcagcctcccaaagtgctgggattacaggtgtgagccaccgcgcccagccccctttttttgtttgtttgtttttcatcctacaactctgtaaaatcatctctgtagaatcaatctccttccgtgaccaaggtggtgtgattgaaattaaccggggacaaagtagacagctatagttggggaaccccgaattgaacaattcagccaggatttgcagggagagaaatctctcaactaatgggttccctgataattgtgtgagattcgggacctcccttctcaaagcttaactggagacagagaactggggacgtagcaggagagaaaaaacacaaatgacagtaatttatccacagccctgagaactccagggaaagttcctggggggtccggtgcctctttttcaggcagacactggaactaagaatagctctcatggcatagtttgaaggcagcagaagtgcccagggttcactctctcctggcgcttgccgttccagccccgcgccgtggcgaccttggatccagacacctggagatgctgagctgaccagaactggaaggccggtaaggttcagtgcgggcgttgtaggtaacccttccagccagaaagtggcatcgtcttttaaaatacagggaccgtgaatggccttctgcgcagggccgtcccttgggcgtctaacccaggagcgcctcggggtctgggagttggaacctgaatgagtaaggtgttaatcagacctgactcgcattatagattgggctcctggtggcttctccttcctaaaaaagcatacccactataaaagcataatcgtaggctgggcgcggtggctcgggcctgtaatctcagcactttgggaggccgagacgggtggatcacctgaagtcaggagttcgtgaccagcctggccaagatggcgaaaccccgtctctactaaaaatataaaaattagctgggcatggtggcaggcgcctgtaatcccagctacttaggaggccgaggcaggagaatcgcttgaacccgggaggcggaggttgcagggagccgagatcatgccactgcactccagtgtgggcgacagagcaagactcatctcaaaaaaaaaaaaaaaaaaaaaaaaccgtagtcgtttcatgggaattataaggaatgtcctccctgttgcggtttcttctgcaaagcaacaggtcgggaggggaggggagaggctgccactatcgcttgccttggagaaaagcttagagcaccattagcgttgggccggtgccacagagcaaataggactgagccccatctgaggtgcccagagttgccgttaaaagcccccaccccgcgtctggccctttctgaagcactttcagccccgtcaagcactcctggggtatctcatgttgtctgagcaaatacactcaagcagagggctttgtgggcaagattaatgacctccaccattcttttgttactctgcattggtaactcagttgctttatacttactgatgtaatgacttgctttcatagaatttacctttcctttgttacattttaaaatataaattgatgacttttacttaatttttttttttttgatgactcttaaaacactgaagaattaggctgggaaagaccatgtattgaatttacgtaacacgtgttatatggactaacgtgcagttatttgtaatatggtaagaaaacttgattgtgggaaaacagaccttcaccgtattttgatatttacacgactttattaaattaatctgaatattgggaattttaatttacttcaaagaaggaagcagataaaagataaatcaattaacaagagatgatttttagtccccgattatttatacatatatctaaataatgtaaaatcccttcttttgcattcaaacttagttcttaaacataaaatttaaaggtgcttgtgtgagaatatagatgtttacaattatccagttttcttttaaatgaaatggatgtggagcctatcagtttcttgcaggaataaaaatacgatagcacgctccctaagtaagacagatggttttgggttttgttttctgttttgataaggccgtttgtgagaaaaatttacttgcagagaaatgttaaacgttaactttctcgctgatcagcaggtagcctgtcacgctgaagtagttctgtccacggatgtgggtgtgggaagagtggttgttccctgggggctgtagagcccgccaatcctcacccctagcccggagcccgctctttgcagagcccagctggttgcgcagagcgaccagcgccagtctgtgctctggtactgtgcaccgccctgggttccctgcagtccaccgacgagagctgcccagcgcagggaaggaacgcttcttgctcaacagcgccctcgcccgacaaagcaggacaattccccagctcccaagccctcttctgtatttctcaaaaatgccattggctggagtggcggtgaagaggactaacgcctggtgacctgtaccagggctcccggcaagcaaagcaaaactagaataaaacctcaagtaggccgggcgcgtggctcaccctgtaatctcagcactttgggaggccgaggcggtcggatcatctgaggtcaggagttcgagactgacctcacgaacatggtgaaaccctgtctctactaaaaatacaaaagttagccaggcagtggtggtgtgcgcctgtaatcctagctactcgggatgctgaagcaggaggatcgcttgaacctgggaggcagaggttgcagtgagctgagatcgggacactgcattccagcgtgggagacagaatgagaccctgtctcaaaaacaaaaataaaacccaaaaaaccctcaagcagagggaaggcctcaaggccctgtactctgagcagcacggtcaccctcacccacttcatgcccctacaacacttagggagctatctccctcccctacctgcacctttcttgatctctgttgcgtttccctcctggccacttgcgggcactgtcagggaggcagtttcctggaaaacatcagggactgtttgttcttctgggcctgccctatctgccaggctcccacttcttagccctagcccggtcagagactcgaacggggaggagaaggctgacccccactgaaagcctctctgcacctgtcagtcctcaggctcataggaaaacacactcgcacatatgttaaacgcagtgcttgcgttgtgcacatttctgttctcgtgtttcattataaaatgtgaatatttagacatttccctcagcagacaaaggatccttttggaaaacaatcaggatatttatggcattttttttttttgaggcggagtttcgctcttgtcgcccaggctggagtgcaatggtgcagtctcagctcactgcaatctcagctcactgcagcctctgcctcccaggttcaagcgattcgcctgcctcagcctccaagtagctgggattacaagcgtgcgccaccacgcccggctaatttttgtatttgtagtagggacgggggtttcactatgttggccaggctggtctcgaactcctgacctcagatcgtgatgctcctgcctccgcctcccacagtgctggtaattacgggcgtgagccactgcgccctgcctggcataaaacttttaaagctgcatatgtttgtggggtaaggtttttaaagtggataaaggtgtgctgaatgttttaacagggtccagttagaactggacgatttacagaagttattctttctctgacacctgccactgccgagttaggccctgtctgatcgcagggcgccaaatagccgttagcagggcaagattgcttgtggccataaagtagggcctgaggaaataggagtgttttataatcacgaacagagcttaacaaagaagcagcttcctgtatcccccaaagagtgaacaactttatggaaaagatttggtttcaaagagcctcatcactttcttagctcatcacagtgaattatgaaaatatggctggggccgggcgcgatgtctcacgcctgtaatcccagcactttgggaggccgaggcgggcggatcatgagatcaggagatcgaaacacggtgaaaccccatctctactaaaaatacaaaaaattagccgggcgtggtggcatgcgcctgtagtcccagctactcgggaggctgaggcaggagaatctcagtgagccgagatcgcaccactgcactccagcctgggtgagcagagtaagactccgtctcaaaaaaaaaaaaaaaaaaaaaaaaaaaaatggcagggaaaatgtaatgtctgcagaggctccttacaggcgaatttgctcatatatatcatgtgcacattccctccgccacccgccccagcgtccgtgcaggatggaatggcgtggagattcacggtgtcaaagtccttccttgtcaggccatagtaagttttgtcctgtttctcatctggttccaattgaactttggaatctgaagatttggggtttctgatgcactgccccagaccatttccgctccttatttattattattattattattattattattattattattatttttgagacggagtctcgctctgttgccaggctggagtgcagtggtgcaatctcagctcactgcaacctccgcttcccgggttcaggcgattctcctgcctcagcctcccgagtagttgggactacaggcacatgccaccacgcccagctaaattttttggtattgttagtagagactgggtttcactgtgttggccaggctggtcttgaactcctcacctcaagtgatctgcccacttgggcctcccaaagtgctgccattacaggagtgagccaccgtgcccagcctgagttcacatcctgccctcatccagaagctctttaccatcaattttcaagactggttcctccaagccctttctataccagcctcatctgtgcacagctccctgcggccgctgctctccttgaaatacagatctgatagttggactccctgactcaaaaatccatctccagttcctgtatccagagtcaaacctaaactcaacagtgggtattccaggcatatgtcaccgtttgagccctttgcccatcacagggtctcacttgttccacacaaggctcctcatggctccccacttgcaccccctgttttcctgccactctgatttttttttttttttttttgagacggagtgtcgctctgtcgtccaggctggagtgcagtggcaggatcttggctcactgtaacctccacctcccaggttcaagtgattcttgtgcctcagcctcccaagtagctgggattacaggcatgcgccaccacgcccatgcctagctaaattttcagattccacccgcctcaatctcccaaaatgctggtattacaggcatgagctaccactcccggtactgccactctgaatttgatgctctcctctgccaaaatagtcttagaattgcaaacccacatgccacagatgtctctgcgaggcccttcatgaacccgttcctgaccttccttcatgcttagaatcatgggtatcttaccgtgtgatgctttgtagctggttattagcatacatgtgcgtctctgtccattagattgtaaaatgctggactgaggcactgtgtccaactccttccatctgaattcttcacagtgcctgggacattttgggccgcggtaacaggaacacgggcttatcgaatactgataaggtgtctaaactctctaaaattggtattgatatgaccaactgcagatgacttacgttctgtggtttaaaacctcaggatgtcaccttccgacactcctgcactgtctctgtgtttgtatgtgtctgtcgttacagcttgaacctagggctgaccaacacacttttggatcaaagggagcctttgggtttcagcatcctgtaaggtaatatacgacttcacaataagtaatctgtaatttccttttaatataggcattaatatgctttagtgtcttcaaccacatagattgtcaacaaagtggaaaataattcaatgtattctttggtattgtttagtttccttataccaaggagattttgttggatttctggaatccattcatgtattcattcattcagtgttttctacaaagtgcaattggcctctctcttttctttatacctgttatttctacttctcattacaaattgtgccttgtattatatttatataattgcatgtgaattgtatatgcatatacaaaaacttatatattgaggtatatttctattgttctaccaggatataagctagtatattgtctagtgcaaagtcgaccttcaaaatctatgtgttgagggtggacatggtggctcatgcctgtaatcccagcactttgggaggctgaggcaggtggatcacctgaggtcaggagttcgagaccagcctgaccaacatggtgaaacccccgtctctactaaaaatacaaaaaattagctgggcatggtggtgggcacctgtaatcccggctacttgggaggctgaggcaggagaatcgcttgaatctgggaggtggaggttgcagtgagccgagatcacgccactgtactccagcctgggcgacaagagcgaaactctgtctccaaaaaaaaaaatctatgtgttgagtaaatggttgtctccagcacagtgggtgccgtgcacctttgagagagccttttcctcccacctcctaagtgtgtgtcatggtcctggtggtgaccaggattctcactgctgtatccatctacactctgtccattttagacaagtggctcacgttcaggatttctgcctgtctctctgtctctgtctctctctttttctctgtctgtctcgctcgatctcctttaccaaaattaaccttgcctgggccgcctccaccaggtgcctttgccctggttacccaagaagactggaaagcttaatacaacccaaagacactcatgtgtaggcataaagctcagtctcctcagactggtcagaaggaagcttcccttgtatgccttacaccaatagttttcttttctcttctgacatctcactctgtcacccagcttggagtgcagtggcacaatctcagctcactgcaacccctgcctcctgagcttaaatgatcctcccacttcaccctcctaagtggctgggaccacaggtatgtgccaccatgctctgctaattttgtaatttttttgtagagacaaggtctcactatattgcccagactggtcttgaattcctgggctcaagctatcctcttccctcggcctcccaaagcgttgggattacaggcatgagccattgctactggccacaccaatggttttcaatcctcatagaattactagtggagcttttaaaaatacagatgcctgggtggttctcccaggcactcggattcgcttgctctagggaaagacccatgcatctgttttttgttttgtttttgtttttgtttttgttttttgagatggagtcctgctctgtcactcaggctggagtgcagtggcacgatctcggctcaactgcaactccacctcccatattcaagcaattctcctgcctcagcctcccaagtagctggaattacaggtgcgtgctgccatgcctggctaatttttgtatttttaatagaggtggggtttcaccatgttggccaggctggtcttgaactcctgatgtcaggtaatccacccgccttggccttccaaagtgctgtgatcacaggctgtgatcacagccaccgcacccggccattctgtttttgattagttgaaaatgctgtgactgacaaagcatgagctgcagccatgcactgcacactggatatacaatttcactttatatttttattacagaaaatttcagacatacacaaaagtggagtgaatagtacagtgaaccccatgtacccatcaccggcctcaatagttatcaatgttctgagctcatcatatttatcacccgcaactatgttgttgttgttgttagcatattttattttatttatttattttattttgagatagggtcttgctctgttgcccaggctggagtgcagtggtgtcatcccagctcactgcagcctccacctccccaggcttccatctcggcctctggagtagctgggactacaggtacaaaccaccacacccagctaattttttttttttttttttttcagatatggggttttgccatgttgctcaggctggtctcaaactcctgggctcaagtgatcctcttgctttggcttcccaaagtgctgagattacagacatgagccactgtgtcccaccccagcatattctaaagccaatctcagacatgctaggaattcacctgtgaatacttcagcataaatacctaattgtaaacatggctaaaaatggaactatgctcatatttctgtcttagatgaacatacacattctgtctgctgcagaattcctcaacctcagcactattggcactttgggctggataattcttcacggtgggaactatcctgggcctcgtagggtgtttaccagtattcctggcctctactcactaaatgtcagtagcttaccctccattgtgacaaccaaaaatgtctccagacattgccaaatgtcccctcgaggtcgagaaccattggtctattggatatcttatgaagtaaaaaactatcatccattatttatagaagggtgttttctctctcccttttctcttctatctgaaaaaaaaggatattgaaatcagctttgcaaataagcagtgatcaattgacaaactcacttcttcagaagaccacagagaaaaatgcaaataagttaatgaatgaaaagcaggtcgaggcatggtggctcatacctgtaatctcacactttgggaggccaaggcaggaggatcacttgagctcaggagttgcagaccagcctgggcaatatggcgaaaccctgtctctatgaaaaatataaagaattagctggatgtggtggcatgcaccagtagtctcagctactcaggaggttcaggtgggagatgcttgagcccaggatttcaaggctgcagtaagctatgattgcctcactgtgctccagcctgggtggcagaatgagaccctttctcaaaaacaaaaaagaaagaaagtaagtgaaggataagagattatggccgggagtggtggctcatgcctataatcgcagcactgttggaggccgagctgggcgaatcatttgaggtcaggagttcgagaccagcctgaccaacatggtgaaactccgtctctactaaatacaaaaattagccaggcatggtggtgggtgcctgtaatctcagctatttgggaggctgagacaggagaatcactgaactcagaaggcagaagttgcagtgagctgagattgcgccactgcactccagcctgggtgagagagtaagactccctttcaaaaaaaaaaaaaaaaaagattacagggagggggtatcttaatacttgccatgtatgagcaaatccaaaatcttataaaacctggaatttaggggttccaaattttacatacttaagcactttcttttttctttctatttccttttttcctaagcacatcttttttattctggcagagcaaaggacttgtgcctccaatttctttatggcaacatctggaaaaattagctgcttctctagaccagggtttcagagatgtcagagtaaatttcctccagaacccaaggggttacagcatttcccatgctgcaggggacagagggtggggtgggagagtggggcttcacctaaatgggacatcaattatccaagaagagtcaagtccgctatttgatcagagtgagcctcctaatcttggaactcagtgttttcagttgccttttaccttccttgaagcacaccctcttccttgcgactgtctgaattgactggctcagtcagatttataactcacttctgaaccggggtaggtttatcaccaggtgcctccaataggtgcctagagttctctgttctgatgacttaaattctgtgtgttgtgaaggcaaagaccagaaaggaagactggggagttctctgcttctgggaaaaagcaccctctagaagcaatttaggacgaggttcaggttgattaatggtatatttgtttcttaaatattagagtctatttacccatgtcaaagcgtcaagaatacctgcggagttccggggagcaagtactggccagtttcccagtgcaagccacgattgacttctacgacgatgagtctactgagtctgcttccgaagctgaagagccagaggaaggacccccacccctccatcttctgccccaggaggtgggaggtcggcaggaaaatggcccagggggaaagggcagagaccagggcatcaaccaagggcagcgatcctcaggagggggtgaccactggggggagggtccgctccctcaaggtgtctcctcaaggggtggcaagtgctcctcatccaaatgaatcagtctctgtctcctgggccctgctctgggacctgcccctcacgttctcttggggacacccgagccaggacactacgcatccctgctgagtgtgcagaggctagaggcttctcgggcagcccctggcctgcacactactcatgacagaaagtcagcttttacttttctttcccctggcaattcgtttttggtgcactcatgcatgcctttgagaaaggattctaggagaaagagaaggtctatgtcaacagagttgttatctcatagagccagttttcaaagctccttctgcattgtcactcactgatcaggtgatgaattcttcctagatagtcgcccactccacctcctacttaacctgagactcattatttagctatttctgcttttgtaaaaataattcagatattaaactccaattttaatctatcatccaagggtagatgtagttgcttagtagcattttggaaaaaaaagaaaaaaaggtttggtttggttttgtgacggagttttgctcttgtctcccaggctggagtgcagtgacacaatctcggctcactgcaacctccacttcttgggttcaagtgattctcctgtctcagcctcccaagtagctgggattacaggcatgagctaccacgcctggctaattttttgtatttttagtagagactcggtttcaccatgttggtcaggctggctttgaactcctgacctcaggtgatccacccgccttggcctcccaaagtgctgggattacaggcgtgagccactgagcccggccaaaaaaaaatgtatttattaaaaaaaaatttttttaacccgccgaataattcccataagagtaacaaaaaggaccagcctgaccaacgtggagaaactctgtctctactaaaaatacaaaattagccaggcgtgatggctcatgcctgtaatcccagctactcgggaggctgaggcaggagaatggctagaacccgggaggcggaggttgccgtgagtcgagatcgcaccattgcattccagcctgggcaacaagagcgaaactccgtctcaaaaaaaaaaaaaaaaaaaaagaaagaaaagagtaacagaaagatagggatttttaggagacaattagataaaaatgtatgtgatgactgtataaggaggcctgtgtgtatgaatttatagggagtagaaccgtctctcttcttagttggtgactgtttggggcctggtattttaatagatgaacactacttttttaattttttatttttttaaccctacccttaacccatgaacactatttttaattaaagtatctgatgtaaaattattttgagtttttaatattttgataaacgtgtattcctgaaactttttgacttacttatcttacatgtggtgtcttcctgtatatagtacattatatcaatttctacttgaaataaatattttgaaagaatgtttgataatcacccttttttgcttaagacatttttagaattaaatagtttctgctttaaggttttttcatttttcatggtttttaaaaataattcttttaaaattataacctattattttatttcagtattctgttttattttttaaaattttagacacagggtcttgctccgtccctggctggagtgcagtggctcaataatagctcactgcagccttgaactcctgggctcaaggaatcctcccacctcagccttcgcagtaggtaggacaacaggcgtgagccaccatgcccagcaatgttttttgagacggagtttcgctcttgtcacccaggctggagtgcaatggcacaatctcggctcactgcaacctctgcctcacaggttcagtcgattctcctaccttggcctcctgagtagctgggattaccggcacgtgccaccaagcctggctaattttgtatttttagtagagatggggttttaccatgttggccaggctggtctcaaactcctgacctcaggtgatccacccacctcggcctcccaaggtgctgggattacaggcatgaaccaccatgcccagccacccagttaattaaaaaaaattttttttttgtagatacaggttctcaatacattgccaaggctgctcttgaactcctggcctcaagctatcgtcttacctaggcctcctaaagcactggaactacaggaatgagccaccatactaggcccaatatattaaaaagtaggagtaatgaatggaaatactttcagcaatccaaacactatagaaagtacacattgcaaagtaaaatcacattctgctcttccccctttcctttgtctaaagataacaaacatcaattgtgttttatggcttcagtcttttgaaaaattccttttttgtgtgtttttcttttctgggcctttttttcttttaaaatgtttacttttttgtgttttgaacaaatttggctactttttcatttaaaaattaaaaattatattttattgtttcttttacttgtttaaagtacatcttttcagacttaaaaacaattaaacctgggtcaatttcagaaaggatttaagatgaccccgaattttgctggcttttcacagaaaaatgctagaagtcttatcctcactccttcatgtgatgcttaagataaaaactaaataatcacatctgactttgttgagttttcttgataaatcagttttattgacaaataaagcctggtccaataatgagtttatcctaaataaaccaaacatagtccaaattctgatggcatcaacctccacagtttaaaatatgctgcgtgtgccaggtgagatggttcacccctgtaatcccagcactttgggagaccgaggcaggtggatcacttgagtccaggaggtcgagacctgcctggacatggtgaaaccccttctctactaaaaatacaaaaaattcaccaggcgtggtgacacgtgcctgtagtctcagccacttgggaggctgaggtgggaggatcacctgagcctggggaggttgaggctgcagtgagccaaaatcacaccactgcactccagcttgggagacagaaagagaccctgctcaaaaaagttgattaatatatgctgtatgatagttttacattacattaattctaaattacttagaatctggccagcttagtgcaaatacaaaacaaggcactttagctatggctagcaatggaatcacatatactgtgggtcagacatttttgatagcaaggatatggtgagcttggggcctccttagctctctgattgttacaattacgtgaattaactaaaagtctcaaacctaagagctccagggttttggtcatgtatccctctcacttaaaaaatgtagctgagcatggtagctcatgcctgtaataacagcactttgggaggctgaggcaggaggatcacttgagcccaggagtttgagaccagcctgggcaacagagggagacctcctcctcaacaaaaaattaaaaagctagccaggtgcagtggtgtgttactatagtcccagcaactcaggagcctgaggtgggagatgctggagcctaggagttcaaggttgcagtgggctatgattgcagcactgcactccagcctgggcaacagagtgagactccacctcaacaaaatacaaaattaaaaatgtgtgcctgccccctaacatatattcacttatgaattatatgttatgttgagccatttgaaattgctgatgctttaccatttttaacctacaaaaaaaggcaatttcatatggttcaaccaacatgtactattgggataatatattgcgcattacaaaatatacacaagacgtatattttaaaggaaagcccaagttgggcatggtggcttacacctgtaatcccagcactttgggaggccaaggctggaggatcacttgtgaccagcctgggcaacatagcaagaccacatctctacaaaaaaaaaaaaaaaaaaagcaaataagcaatttcatcactttttaaaacttgtattttaagttcagaggtacatgtgcaggtttgttacataggtaaatgcatatcatggggtctttttatacagattatttcatcacccaggtattaagcctagtacccatttgttattttttctgatcctctccttccttccacccaccaccctcctatgggccccaaatgtgcgttgttcctctctgtgtgtccatgtgttctcatcatttagctcacacttgtaaatgagaacatgcagtatttggttttctattcctgcattagtttgctaaggataatggtctccagctccatccacactcctgcaaaggatatgatcttgttcctttttatggctgcgaaatattccatggtgtatatgtaccacattttctctgtccagtctaccattgatgggcatttaggttgattccatgtctttgctactgtgaacagtgttgcaatgaacatacacgtgtttgtgtctttttaaaataatttttattttaggtttggggtacatgtgaagttttgttatacaggtaaactcgtgtcacaggggtttgttgtacggattatttcatcgtccaggtattaagcctagtactcaataattattttttctgctcctctccctcctccctccatcctcaagtaggccctagcatctgttgttcccctctttgtgtgcacgagttctcgtcgtttagctcccacttataagtgaggatataccgtgctttcttccctattcctgtgtcagtttgctaaggataacggcctccaaatccatccacgttcctgcaaaagacatgatgttgttctttttttttttgagacagagtctagctctgtcgcccaggctggagtgcagtggcacaatctcagttcactgcaagttccgcctcccaggttcatgccattctgcctcagcctcccgagtagctgggacgacaggcgcctgccaccaggcccggctgattttttttgtatttttagtagagacggggtttcactgtgttagccaggatggtctcgatctcctgacctcgtgatccgcccgcctcagcctcccaaagtgctgggattacaggcgtgagccaccgcgcccagccgatcttgttcttttttatggctgcataatattccacattttctttatgcaatctgccattgatgggcatttagactgattccagtgcgtgtctttatggtagaatgatttatattcctttgggtatatacccagtaatgggattgctgggtcgaatggtagttctgttttgagatctttgaggattctccactctgctttccacaatagttgaactaatttactttcctaccaacagtgtataagcgttcccttttctctgcaacctcactagaatctgtttttgttttgttttgttttgttttgtttgctttttaacaatagccattctgactggtgtgtgatggtatcttatggttttgatttgcatttctctaatgatcagtgatgttgagctttttttcatgttggccacatttatgtcttcttttgagaagtgtctattcaagcccttttcccactttttaatggagttgtttgtttttttctcttgcaaatttgtttaagtaccttatagatgttagatattggacctttgtccaatgtatagtttgcaaaatttctctcccattctctaggttgtcttcttactctgatgatagtttcttttgctgtgcagaagctctttagtttaatagatcccatttgtcaatttttgcttttgttacaattgcttttggcatctctttttcttttctttttttttttttttaagacagagtcttgctctgtaacccaggctggagtggagtggtgtgatctaggctcactgcaatctctgcgtcctgggctcaagtgattctcttgcctcagcctcttgagtagctgggattataggtgcccaccaccacacccagctaatttttgtatttttagtaaagatggggttccaccatgttagccaggctggtctcaaactcctgacctcaagtgatctgcctgccttggcctcccagagtgctgggattacaggcatgagccaccacactgggctttgcttttggcatctttgtcatgaaacctttgcctattcctatgtccagaatgatattgcctaggttgtcttccggggtttttatagttctaggttttacatgtaagtctttaatccatcttgagatgatttttgtatatggtataaggaaggggtccagtttcaatcttctacatatggctagccagttatcccagcaccatttattaaatagggagtcctttccccattgctttttttttttttttttttttttggtcacctttgttaaagatcagatggttataggtgtgtggccttatttctgggctctctattctgttccatccgtctatgtgtctgtttttgtaccagtaccatgttgttttggttactgtaaccctgtagtttggcttgatgtcaggtagggtaatgtccccagctttgttctttttacttaggattgccttcactatttgggctcttttttttgttccatatgaatttttaaaatagttttttctagttctatgaagaatgtcattggaagtttgatagaataacgttgaattggccgggcgcggtggctcacgcctgtaatcccagcactttgagaggccgaggcgggtggatcacaaggtcaggagatcaagtccatcctggctaacacggtgaaaccccgtctccactaaacatacaacaaattagccgggtgtggtggcaggcgcctgaagtcccagctacttgggaggctgaggcaggagaatggtgtgaacccaagaggcaaagcttgcagtcagccgagatcgcgccactgcactccagcctgggcgacagaatgagactctgtctcaaagaaaaaaaaaagggaataacgttgaacctagaaattgctttgggcagtatagccattttaatgatattcttcctatccaggaacatggaatgtttttccatttatttgtgtcatttctgatttctttgagcagggttttgtaattctcattgcagagatctttcacttccctggttagctgtattcctaggtattttattctttttgtggcgattgtgaatgggattgaattccaatttgactcttgctggctgttgttggtgtataggaatgctggtgatttttgcacattggttttgtatcctgagactttgctgaagttgtttatcagctgaaggagctttttggccgagactttagagttttctagatacaggatcatgccatctgcaaagatagcttgacttcctctctttccatttggagatgctctttatttctttatcttgcctgataagcatttaaattattaatagttcttaaatccttttattctcatgaaataaatatatatactaaataatgtatactgtgtacatatatataatatttaagccacctcacagagaagcatggattcaaataaaagaaatatagcatgcacttactaaattatacttttcagtcacatccaccaattttgaagaagtttttactgaaagttgatgaataaatcttctcttgatgtgaatccaagtttatttatttttccttttttactctttttttttcttcttctttttttttttttttttgaagcagggtctcactgttgcccaggctggagtacagtggtgtgacctcggctcactgcaacctctgcttcacaggttcaagtgattctcctgcttcagcctcccaagtagctgggattacaggcacctgccaccacgcccagctaattttttttttttgtatttttaatagagatggggttcgccatgttgcccaggctggtctctacctcctgagttcaggtcaatccgctgacttcagcctcctaaagtgctgggattacgggtgtgagccactgcacccagcctatatagatcatatgtatatatcatagctcattgcaacctcaaattcctgagctcaagcaatccacccacctctgcctcctgagtagctgtgattacaggtattcgccaccatgcccagctaatttttacatttttgcagagatgggggtctctctgtgttaccaggctagtcttcaactcctggcatcacgtgattctccctctgtggcctcccaaagtgttttaaaatgaaccccattgtataaccttcctgaagaagtcagaagattaccactagcctatcattctacagcaaaacacgaatggggagagagagagagaagactgctcttcgaaagaccaattttgggttcctatctcttggattttaaaaatcaggtgatttctctttaaaaatctggatctctggcagtgtttgcatgtgttcctgcaaggaatcaatcagctggagctgaggaacggctgttggcattaaacagcccagccttccccactctccacagtctgcatcttcctccatccccttccatttctttcctgcaacagcttgcctaataacggtgcagtacatggatttcacacgtggtgacatctctatgtgttttctctggaatcattttagcattctaatcaaaatggctgctccaacaatggttatacttagctaggttttctataaaatatccattttttaaaaggtaatttatggttgaggctgactcgtttgacacatctttctttcagtggctcacaaaaagtagctcctaatgaatttcattattgaaacagaattttgcaaataccacaagctggaacatgctagaaatatctgcactttcacccagctgtactcaaacctcctacgctgcgtgatttgatgtaataatggtttattcaaatctccagccacatcttctttgagtcttccaatagattttcttacaaaagaatgcatttcaatttcttgccatagtgtttcctatttgctattttaaccagttttactgtggtaggaagacagtgttttctaatattttttaaacttctataataaacatggaattgcaaaacatgctgtttaacacaccgttaaacatttgtcattaagttgagtgaaattttgtgtgatctggtgttgaggatcacatgatttttaaacacaattgacagtatctacagtaaaatgtatgctttgcttgaggtccaatgataaaagatgttaacaattcaattatttttcttgataatgttaattatttttgctaactttttgccaactttttgccagatctcttttagcttgttatgtggctgatgatgagcttgcaataaagacagaaatattagccttgacatttgtttgtggtttgcttgagcttgcattatctatattattttcaatccagtttcttgggaagaattttgtttgttttgttttgttttagagagacagggtctcaatgtgttgtccaggctggagtccagtggtgcgatcacgggtcactgcaggcttgaactcctggcctcaagcaatcctcccacctcagctttctgagtagctggtactacaggtatgtgccaccatgccttattattttgtgtgtgtgtatgtgtgtgtgtgtgtgtgtgtgtgtagataggacctcactatgttgtgcaagctggtctcaaactcctggcctcaagtgatcctcttgccttggcctcccaaagtgttgggattacaggcatgagccaccacattcacccagaaaaattttaaattttaaattgtgatgtaattcacatacgataaaattcaccttttttttgagaccgagtttcactcttgttgcccaggctagagtgcaatggcgtgacctcggctcacagcaacctctgcctcccaggttcaagcgattctcctgcctcagcctcccaagtagttgggattacaggagtgcgccaccatgtctggctaattttgtatttttagtagagatggggcctctccatgttggtgaggcaagtctcaaactccccgcctcaggtgatccacccatcttggcctcccaaagtgctgggattacaggcatgagccaccgcacccggccaaaattcacccttttaaagtgtacagttcaggctgggcacagtggctcatgcctgtactcccagcacttcagaagccagaggcgggaggatctcttgagacctggagcttgagaccagcctgggtaacatggtgaaaccctgtcactacaagaaatacaaaaattagctgggtgtggtggtgtgagcctgtagtcccagctactcgggtggctgaggtgggaggattgcttgagcctgggaggttgaggttgcagtgggctatgatcacaccactgcactccatcctgggtgacagagtgagactgagaccatctccaaaaaaaaaacaaaaaaactgtacagttcagcatcttttttgtgtattcacagaagtgtacgagcatcaccactaatctcagatcattttcatcatcccagaaagaaatctcatatccattagtagacactcccatatcctccaggccctggcagccactcaactttctgtctctctggatctccctctcctggacatttcataaaagtggaatcataaaatatgtttttttttaatttggcttctaaattatcttttaaaacttaaaaaaaaatttagattaaaaaaaagcccagaagtctcaatactgcaccctgtccccaccaaaccatggtccctttccacactcgcctgggctgtgcacgtcgactgtggtgagggcacagcattgatgctgtcaccagcacagccttgatttcgttacaatccaattacctcggctcagagaacaatttattctgaataaagaaataagcaaatccttgttttgcaaatttctgctgttggcctagagagtgacagtgcccccaaagatgggccagcaggggctcaaagcatcccactcattatgctctgcaggaacgctccactgcatggggcacatgcgttttcagtagcactgtcttcatgcagagagaatagaacgtttgttatcaaagaagactgcaaaaaagtaaaatctgtaccaccaacaagccaattcactcacgaactgttctttttaggacttaggagtaaattctggtgggcaccacacagaggagttttagactatttcaggtagatgttaaagtaaggcatgaaaagtaaggtataaaatgctccctgaaattatatgttaaagtaaggtataaaactgctccctgaaattatatataagattattctttctctttatattccagaggtgtatttgaagagcacattttttagagggaaagtcatagcaattttgttacaaatattaacatcaaggaaataaaaccatccttctttctaggctagtttttccatgtaaacttttaattttttttatattttgtatttattttattttattttatttatttttcgagacagcgtctcagcattagtccgttctcgtgctgctataaagacatacccgagactgggtaatttataaaggttagaggtttaattgactcacagttcagcatggctggggaggcctcaggaaacttacaattatggtggaaggggaagcaaacacatccttcttcacatggcagcagcaaggagaattgccgagcaaatggggaaaaacccattataaaaccatcagatagctgggcatggtggctcacacctgtaatcccagcactttgggaggctgaggcgggcagatcacctgaggtccggagtttgagaccagcctgaccaacatggagaaaccctgtctctactaaagatacaaaattagccaggcgtggtggtgcatgcctgtaatcccagctacttgggaggctgaggcaggagaatcacttgaacttgggaggcggaggttgtggtgagccaagatcgtgccattgcgctccagcctgggcagcaagagcaaaactctgtctcaaaacaaaacaaaacaaaacaaaaaccgtcagatctcgtgagaacacactatcacgagaacagcatgagggtacccaccctcatgattcaattacctcccaccaggtccctcccatgacaagtggggattatgggaactacaattcaagatgagatttgggtggggacacagccaaatcatatcagacagggtcacaccctgtcacctcagctagagtgcagtggtgcagtcacagctcactgtggccttgacctccctggctcaagctattgccttcctcagcctcccaaagtgctgggattacaggcataagccactgggcctggcccaatgtaaactttctattacagaataatacacctatagaaactacataaatcgtatacttgatataatttgcaaagttaatatgctcatgtaagcagtacccagatcaaaaacagagcacaactggtcgcctaggataaccccttgcactctcttccagtctccatgcctctaaaaccgtagatacgatttgtctggttttgaacttggtatcaaagggaccaaatggtatgtgctcttctgtgtctggcttccatccttaacattgtgcttgggagaatcagccaaactgtgatgtgaagctgtaggcagctcgttctcattgctgagtagaactctgttgtgtcaatgtattcactgtcctattgacaattggttagtttccggtttgtggttatcagaaataacactgccttgaccattcctgtcgatggctgttggtggacatatggacccatactgaatgcatttctttttcttttcttttctttttctttatttctttctctttctttctttctttctttctctttctttcttttcttcctttcctttctttctttttctttctttttttttctttctttctttctctttctttcttttcccttccttccttccttccttccttcctttccttctttctttttttttgttgagacagggtctcactgtgtcacccaggctggagtgcagtggtgccaccacaactcattgcagcctccacctcccgggctcaagcgatcatcctgcctcagcctcccaaatagccgggactaaaggcatgtgccaccacatctggctgatttttgtattttttgtagagatgggttttcaccatgttgcccaggctggtcttgaattcctgagctcaagtgatccacctgcctcagcctccccaaagtactgggattacaggcatgagccacggcgcccggccatttggtgtatttctaggagaagtagcaagaagatagtttttatgtcttcccctcatatgtttggtgtccttcagcctgaaaatagtttaaaaactgaagagtggagggcatggaccacgaagttttagaggaaaagaacaaagttaccaaacaggctgttcttttctttgcgatctttactaatgaaccagagcttaggggtgctgttgtgtccagaaagtgaccagagtcagtgggctctttcttcttcctaaattgggattttgtaacaagatatagaagcttacttcatttgggaatcggatgtgacttggaaatgtgaaaggggacctgggaattcaatccacccccgtttttttaagatggagtcttgtgctgtcacccaggctggagtgcagtggcatgatcttggctcactgcaacctccctctcctgggttcaagcaattctcctgcctcagcctcccgaatagctgggattacaggcatgcaccaccacgcctggctaatttttgtatttttattttttcttagacaccgtctcactctgttgcccaggccaaggtgcagtggtgagatctctgctcagtgcaacctccacccttcctgggctaaagcaattctcctgcctcagcctcccaagtagctgggactacaggcatgcaccatcatgcctggctgatttttgtatttttagtagagacggggtttcaccatgttagccaagctagtctcaaactcctgacctgaggtgatccatccacctcggcctcccaaagtgctgggattataggcatgagccaccatgcctggcttaggaattcaatctcttaagaagatcctggagaagtctaataattctcttctgaaggatctatgaacttaccaaggcttcaactcatctcatctctttacatacagagaaaatttaattacagaaagcgtcagattggagaacagaacccacatcctacaaatgctccttctcagcagggagcatggccccccctccctgacctcccttcctctggggtagcatccttcaccaggttttacttacactgaccacgggccacctgtcgctactctttatctgcttctatcgtacatccctaccatgccaattatagattttactaagattgttttctattattttggaccctgaacaatcgactgaactgaaagaggttttatgtttgtttccttgagcagtttatttaatttttagagacagggtcttgctccatcgcccaggctggagttcagtggagcaatcagctcactgtagtctcgaactcctagactcaagtgattctcccgtctcagcttcctgagtatctgggactacaggtgcaaccatcatgccctgctcatcgttttattttttgtagggacagagtcttgctatgttacccaggctggtctcaaaactccttgactcaagtgatgctcttgcctcgatctcccacagccctgggattacaggcgtgagccaccgtgcctggcatgagcagtttatttttgtcacctgtttattctgtgatagaagggtaatatatcaaagaagagaaaaactgtcctatacagaaaccaccagaggaagaatttgctactgtcctgcagagcatgaatcatgtctgcgtgactcatttttgcagaactgctggtgaaaggccaatgcataaataggtactttgtgatgatgatcatgaaaatgatggataataaaaagatacaaacagttctgactgccttagaaggcagttgctggacaaataaaaaatacagtactattttaatattctattgcatcattacttggtaatcattacaaacagatttgattttatagtttcaaatatttcaaaaagatgttcaatgccattacagaaatgcaaattaaaacacagtaagatacttctacatcactgttagaatggatacaattttatttatttatttattaaaatattattattgtaaattgacaaactatagttgtacatatttatggggtacaaagtgatgttatgatttacaaatacaacttgggataattaaatcaagtgaattaactattcatcacctcaaacttcttttgtggagagaacatttgaaattttactctcttagcaattttgaaatgtacaatacactattattaactaaacttactatgctgtgtaatagattgcaaaaaaccccttatttctcctgcctaacagaggctttgtagtagcctctgaccatcatttacccattccctccagcccccagcctctggtaatcaccatcctactctatgcttctatgaggctattgttttagattccacattatattagtcagggttctctagagggacagagctaataggagatatatatatagaatatatacatagaatatatatatagaatatatacatagaatacatatatagaatatatacatagaatacatacatagaatatatatagaatatatatagaatatatacatagaatatatatagaatatacatagaatatatacatagaatatatacatagaatatatatatagaatatacatagaatatatatagtgtatatatagtgtatatatatagtatatatatagtgtatatatagtgtatatatatagtatatatatagtgtgtgtgtgtgtatgtgtgtgtgtgtgtgtatatatatatatatatatatatatatatatatatatatatatatcagggagattattaaatattaactcacataatcacaaggtcccgcagtaggccttctgcaggcttaggaagaagaagagccagttggagttccaaaactgaagaacttggagtccaatgtttgagggcaggaagcatccagcatgagagaaagatgtaggctggaaggctgggccagtctagtcttttcatatttttctgcgtgctttatattctagccacactggcagccaattagatggtggccacccagattaagggtgggtctgcctttcccagcccactgactcaaatgttaatctcctttggcaacaccctcacagacacacccaggatcagtactttgcatccttcaatccaatcaagttgacactcagtatcaaccatcacacatacataagtaagatcacgtggtatttgtttttctgtgtgtggcttattacacttaacgtcatgtcttctgatttctttttttttgagacttgttccccaggctagagtgcaatggcatgatctcggctcactgcaacctccacctcccggaagtgattatcctacctcagcctcctaagtagctgggattacaggcacccaccaccatggctaatttttttgtatctttagtagagacagggtttcaccatgttggccaggctggtctcaaactcctgacctcaggtgatccacccgcctctgcctcccaaagtgctgggattacaggcatgagccactgcgtcctgcccatgtcttccaatttcatccatgttgttgttaatgagagaatttctttccttttttaagactaaaattccattgtggatatatgttacattttctttatttgttcatctattgatggacatttagattggttccataatttggctagtgtaaatagtgctgcagtgaaaatgggagcacagacatctctttgacatactgatttcaaatcttttgggtaaatacccagaaatgagaatgctggatcacaattttattttgttttattttatttattttattttttttgagacggagtcttgctgtcactcaggctggagtgcagtggtgtgatctcggctcactgcaacctccgcctcccagattcaagcaattctcctgcctcagcctcctgagtagctgggaatacaggaatgcaccaccacacccagctaattttttttttttttttttttttttagtagagacagggtttcgccatgttaatcaggctggtctcaaactcctgacctcaagtgatctgcctgcctcggcctccaaaagtggtaggattacaggcataagccatcatgcccaacctggatcacaattttaaataagaagtgttggcagggatgtggagaaactagaatcctcatattatattattggtggaaatgtataaacagtacaaccattttggaaaacaatctggcagtttcagtagaaagctaaaactgcctgggcactgtggctcacgcctgtaatcctagcactttgggaggctgaagcaggaggtttgcttgagcccaggagttcagaccaacctgggcaacatgtggagaccccatctctacaaattttttttctttttttttgagacgaagtcttgctctgtcaccaggctggagtgccatggcatgatctcggcttactgcaacctccgcctcctgggttcaagcgattcttctgcctcagcctcccgagtagttgggattacaggtgcgcgccaccacgcccagctaatttttgtatttttagtagagatggggtttcaccatgttggccaggatggtctcgatctcttgaccttgtgattccacccgcctcagcctcccaaagtgctgggattaccagcgtgcgccaccgcacctggccaaaaaaaatttttttttaattagccaggcatggtggtgagtcctgtagtcctaggtaggaggatcacttgagcccgggaggtcaagactggagtaagccatgatagcaacactgcactccagcctgagtgataaagcatggccctgtctgaaagaaaataaaaaagctaaacataaattcaccatagaacctagctattccactcctaggaatctacccaagacaaataaaaacattagtccacacaaagacatgtacgtgaatgtttatagtagcgctattcataacaatctcacactggaaatcatccaaatatacattaactggtggctggataaataaaatgtggtatgtccatacaatgggatgttattcagtaattagaagagatgaagtattgatacatgtggaaacacgagtggaccttggaagcagcgtgctaagtggaagaaaccagacataacagactgcattgtatgagtccattttctttttcaatttttatttatttattttttgagacggaatctcactctgtcactcagggtggagtgcagtggcatgcatgatctcagctcactgcaacttccacctcccgggttcaagcaattctcgtgcctcggcttcccgagtagctgggattacaggaacccaccaccatgcctggctaatttttgtatttttagtagagatggggtttcaccatgttggccaggctggtctcgaactcctgacttcgtgattcacccggctcagcctctcaaagtgctgggattacaggcgtgagccactgcgcccgtccgtatgagtccatttatataaaaggtccacagaaaggcgaatttctagtgacagaaaacaaaacagtggttgcttagtgctgggagtgggagcaaggattaactgtaaatcagcacaagaaaactttttggggtgatagaattattctaaaactggattatggtgttagttgcataattctagaaatgcacgaaaatctttgaaatgtacagtgccaatgggtaaatatatagtaaataaattacatcccaataagttgttttttttttaaagcgtagactcttattattaagacaatatttgtatcttttatttagctacagagtcgctacaggaataatacattttttgggggtggagggcatgacaaagtttaaatttttaagaagtaacccaaaggaaaacattctaaagaaatatttcagtttcttccctgagacctctgagtttttttactctcctgggtttattcattaaggccctgtcttctgaagatgtgcagtgacctctgagtcatcaatcacttaaaggtaaagaggtcccaggtgtacttttagaataatgggttcaattccaaagtaagacatgaagggaggaccaattgcctagatccaggtcatcagtaggctagaccttcctgtcctgcgttcaaagtgagtatctggaattacttgaaactccaagattaggttgttaaacaacatggtaagaccactacccaaatttaagttaggtgtaagacttagggcttcagatgtcaacaataccaaaccataatagtcaccattgtcataaagtgggtgctctccagatatatcaacagtacacctggaaagtccatcgttttccagaattttctacaataatatactggtccctagcaacagttaccatatagatgattaaaagacactaaaatttttattttaaaatgcagtttttatcaatatacaacagatacagaaaagcaagcatatcttaagtgctcaatgaattttcaaaggtaacatcccttctataacaccaacaaggttgagaaatagaagatcaccatcaccctggaagcccctcaaagcccctcccagctaccacactcactctcttcctcaaagataaccactattctgactcttaacaccatacatttgtttgcccagttctgaactttatataaatggaatcaaccacactgtatgcactcgtttttgtctggtttattttacactgtacataagtcaaccatagtctcttgtaggaatatgtcaactatttatttattcattctattattgatgtacatttgtattgcttccagggattttggctgttatgaataatgctgctatgaacacttttgggtttgttttttgtgcattatctgtggacatttctgttgagaatatatctaggagtggatgttggctgctagggtatgtgtatggttagctttagtatacatcattttatttggccaaaatctagaaagccacttgaagtgatgtaagtgtaaacatacctaaatggagaaatttcctaaatgtaaacacacgttcattcttcatcagaactgatggagcaaacactgtcacaggcaggacaactgagtatcagtcacgaagttagtggagtgtgatgtctcaccaacatcacttcggaagccatcgcctccgtggggttcgggccttgggaaatgagccccacatgaacttcctggcactcctgccagctcctttcagtggagtctggatgaacaaggctcatagccctgccttggctttgatacaaaggaaaatattaggtgtgttcaatttccctctaaggtctggaaatcaatttaccttttttctttcttttccttttctttttcttttttttttttttaagacaaggtctgtcacccaggctggagtgcagtggtgcgttcttggctcactgcagcctcaacctcctgggctcaagtggtcctcccacctcagcctcctgagtagctgggactagaggcacgtgccaccacacctggctgatttttttttttttttaatagatgcagggtttcactatgttgtccaggctggtctcaaactcctgggctcaagcgatccacctgcctcggcctcccaaagtgctgagatttacaacttattttctttaaaaaacaaaaaagccaggggtaattattagcacacaattgcaggctgagtctctcagttcctggaggacacttgtctgctgctttctggagcttggtggtcctttacctctgggcagggctaaaagctcttgcctgtgactggttcttcctggtggctgtgggctcataatctaccccatgtcagagtccatctctgacaggatttgaagccagggcagctggattcagctcacaatgcttctagtaggatattttcatggcccaggctaatcttaataatccagtgtttgtccccagtgaaaccttccagggagtttctacatcagtttcacttcatggtctctgaattgggtgtccacttgggtttggggaagactttctatgaaaacaaggatccctttggcttgctgcctatccgtggaagttgaagcgttagtcagaattccgacctcagacgcttttacaccctaatgggccaggctgcagagagggctctatcttcttttcttttaacttttctttaaagttggattccttctgtagctgcttgttctcttccatgtctctagggtatttgttagtatacacaagaaacagcttcttgaataatgtccattatagcttcgcatttaaatgacaatgacttcctccctctccctctccctctccctctccctctcccttcccttccccctttcccccttccctctcccttccctctcccttccctctcccttccctctcccttccctctcccttccctctcccttccctttcccttccctctcctttcctctcctttcctctcttttcctctcctttcctttcctttcctgtctcacagggcttgctctgttgcccaggctggagtacactggtgtgatcatagctcacggcagcctagaactcctaggttcaagcaatccttgaggctcaagctcagcctcccatgtaactggaactacgggcacgcaccaccacgcccagctatttaaaaaaaaaaatttttttttatagacaggatgtcttgctatgttgcccaggctagtattgaactcctggcctcaaacaatcttcctgcctctgcctcctaaagttctgggattacaagcatgagccactgcacctggcctgttttatttattttctaccatactctaaggctgcaagtagagcagctgcaatgcctgcttttagcattggagaacttaccatatgctccttactttctgtttttgcttgctttaaaagttgccacaacttttgtcattgttatttgttagtagtagagaagaacttatattctccaagctcagatggggttcctgaatttggccctactttttatgtttttataaaccattgacatgtactaaaactacttgggacatgacttgcaaaaaacttgtcattggtcaaatggcaaatattcactacaaacgtatagaacaacaaatcacctacttgcttaggtttaaaatggaaagaaattattttggattctatattttgggataacttaacattttaaaagtattatttattgcaggctgggcgcagtgtctcatgcctgtaaccctaccactttgggaggccgaggcaggcaaatcacttgagttcaggagttcaagaccagcctgggtaaaaccccatctttacaaaaaatacaaaaattagctaggtgtggtggtgtgtgcctgtagtctcagcaacttgggaggctgagggaggatcatttgagcctaggagacgaaggctacagtgagctgagattgtgccactgcactccagcctgggcgatagaacgagaccctgtctcaaaaaaagagtattgtgtattgattgcataagatgcaatacaatgaatacatatcactcagcattaggaggctaattaggcaatatgagggggcatggctttatcaagagaccaaccaggtcaattttctcagattttaggtcagtttcaggatacgtttgggatgatccttatatgggtgacttaggtagctttttgattgttgttaccagttttcattcattcgttttttttttaaatagctgtattgagatagaattcacatactttataattcacccatttaaagtatacaattaaatggtttttagtatattcactgatacgtgcaatcaccaccacagtcaattttaaaacatgtcatcacttcaaaagagaaacctcatgtctgctagccctcagtcctctattcccccaccctaccctaagcaatcacaagtctacttatctaggctgggcgcggtggctcatgcctgtaatcccagcactttgggaggccgaggtgggcagatcacctgaggtcaggagtttgagaccagcctggccaacaggattagtgaaaccctgcctctactaaaaatacaaaaactagctgagcgtggtggtggacacctataatcccagctactcagcatccaggtccccagggctctgtgggtggcatccgggagaggtggccttgccagaggatgctcagggagaagcagggaccccacagctgtgtattagcctgagggacgtccccagaggtggaacaagagcatgtctccaggtaaatgagcattccccaagtaagtgttagtgtcactgttctgtcctcactgccacccaccatcccccccaatcagtgggctggaaaggacaggtctggaaccagagagggggtttgtggttacagcctctccccacagcaggcctgggtgagggcctcctggcctggggaggcctgtccctcctgccacagcccttgcaaagttggcccctttcacctgacaactctggaggcaggcctgagcaggtggagcggcagctgaggtggggcaggtgtcagttgctgcaggcggctctggggaacagtattgggcattccttcttccacagagctgagtgtggttgattccacctaggatggccaggcagcctcatcacaccagaaggggtggttggatatttagtgttgagctgcccagggacatgagagtgggggtggccacacattcaaaagctgaggtgccctggggaaaaacaaacaaacaactcactaatccacttaaaatcctgagctaggccaggtgcagtggctcatggctataatcccagcactttgggaggccaaggcgggtggatcacttgaggtcaggagtttgagaccagcctggccaacatggagaaaccctgtctctattaaaaatacaaaaattagccaggtgtggcgcatgcctgtaataccagctactcgggaggctgaggcaggagaatcacttgaactcgggaggtgaaagttgcagtgagccgagattgcaccaccactgcactctagcctgggcaacagagtgagactctgtctcaaaaacatcaaactaaaacaaaaccctgagctgaaaccaacacagacttacatttcaaacagtacggacatggcacggggccagcttcaccaggccatatgcacagtgtgtttgcctgggccggcttggccctgaggttttcaggttggtgactatcttgagaactggctgagtacatcctaagacttgcctggaaagacctggctggggacacagaccgcctgagagtcggccccagggccctcctccccgagggatgacccggcccatttgcttttctgagtcaatttccctgtgaccgtcccttttccctctgctctgggggtgcagcagccgtccttctctcttcacagctgccatcagcctctggtatcttggggaccgctctgctccgcacccagagctgtctgaggaagagctttgtggcccttgcccccactgccttctgtcctggacccagatacatcaggcagaaccctgtgcaatgctgatatgtgaccagtttgacctataaaaatgactttcccataggtcaatttggatacagtcttttttcttttctttcttatatttatttatttatttatttatttatttttatgagacagtgtcttgctctgccgcccaggctggcgtgcagtggtgtgatcctggctcattgcaatttctgcctcccaggttcaagcaattctcctgcctcagccccccaagtagctgagactacaggcgcataccaccacacctgactaatttttgtattttttgtagagacagggttttgccatgttgcccaggctggtctcgaactcctgggctcaagtgatccacctgcctcagcctcccaaagtgccgggattataggagtgagccgccgctcctggcctgtatatagtcctttttatttgaaatatcttcctactaattgtgataggaaaataaacagaaagaaacaaaaataaaaatagtgggcatatagactctctagagatggtaaagcatagttttttctgtctgggcctgcctttcctggggccttttattaatagagaactttgtggctgggcacggtggctcacgcctgtaatcccagcactttgggaggcggaggcgggcagatcacctgaggtcaggagttcgagaccagcctggccaacatggtgaaaccccatctctactaaaaatacaaaaattagctgggcatggtggcgcacacctgtaatctcagttacttcacaggttgaggcaggaaaatcacttgaacccgagaaacagaggtttcagtgagccgagactgcaccactgcactccagcctgggcgacacagcaaggctccgtctcaaaaaaaaaaaaaaaaaaaaaattagggaactttggggatgtctcccaaggctaccacgccttccaacttggctggaccagatggcttcccagggacagcaggcgggccaggcccaggctcgtagaatccccatcttggggctcagtctctggttcccctcttctggtctctcctggctgtgctttcattctgcagctctctcttggccctgccctgcctctctctgccttccccatgaatgcccccaaggagtcccacggctcaggcttcctgtctgaccttgcggtcacttcctccctgtgtcctggaggctcctgggtccagccaccacccctggcccactgctctctgtcctgagtgttttgcccacaacatttttctggccaggctgataagtccagaaaagttcagtttccttacctgcgctgtggctttctcttgaagtcaggtgtcttacacggcaggggccaaccttggaagcctggctgacttgacttgctgcctcctgtctttctcctgttcctgagcccccgcagaggccgtctctattttaggcattagtccctgctggccttgctctgatacccagtccaggttgcacattgcttagggccctgcactagcaaggacagaggacagctggccacccccccccccgaaacctgcctcctcagggtcactttccatctctcctcaggtgcctgccccctacccagggacccccatcaatgggccctgtcggaatttccatccagggccctcacagggaatctggttagagatcagaggggctgccaggcagaacaggggcacagcccatgctgagctgtcctgagataaggggtggcttctgcctgggcagcggccactgccctgggcctctcctgactgccacgagcctggacagcaggagttgtccttgcacccctgtgggtccccagaatgcttgcagtcttcacagcctgtaccctgccactgggccaacagtgaccaacctggccaaacatcccgtggacccctctttccatatgccctcctttgtcactggctgcttgttcattgaaccacttgagtcattcactaagaatgcattgaatacctactatgtgccaggtaccattctaggccttagggacatagtggtgaatagggcaggtgaccctccccccaccccccagagctcaaagtctagtgggaacacaagtaatgaaaccaatgatcctctaagtgggatctgcgtactggggcctagccatggcctgtgttaccagcctgcgatgaggtggccaggagttgagagaaatgttgagaaacttctataggaatttgacagggaaagtttttgtttattgagtctagtttaaaaaaaaaatcaggtttctattgtttgtctttttttaattttatttttctagcaattctttttttttgttgtttgtttttgagatggagtctcactctgtcgcccagactggagtgcagtggggtgatctcggcttcctctgctgctacgaggtgaagccaagacaggccaacaagcaggggcacggtcctatcagcagcagcagctgggggtaagtgtctgagggattctcggaggaagtgttcacgtgcagtaaaagatgcccaggtttggggtgagcccagagcagacatgtgtggtttgcacatccttcctttttctggttgcaaagcaaaaggcagatgcatcctgactccactggggtactcaattgtcccattcagaaggacatcatgataaagcaacatctcaccaacagtccaagcccctgctcatttcagctgcacgtatactacaactggaatgatacagagaggattagcatggctcctgtgaaaggatgacacacaaattcatgaagcgctccacattaaaaaaaaaaaagtccaatcctgagacaggtttttaagagcagctttcttgcaaaggtttagcatgcaaacgacttttaaagaaactttttatgccttggacacttactgactgagataagatgctgccaagatggaattctctttatggaaggatttcctcaaagatactatgttgtgcaaccggaaaagaaaagctaaagcacggaaaagggaatttgaactcataatttttctgagaaataagagtagggtctgattcatagatacgttggtttatctggccttctatcagttgatgtttgcgggctacaaaaaagtggcaatgggtgcccttgccaatgatacggatgctccagaagtttctaaagtatcttgtaaatctccaaaaggaaaagcacattattttacgtaatttaagaattgtgcttcctatattcttttttaaaaaaaatatgcagtctgggaaacatagcaagacgcatctctacacacacaaacacacacaaaaattagctgggtgttgtgccacatgcctgtaagtcccagctactcaggaggctgatgcaggaggatcagttgagcccaggggttcaaggctgcaatgagttatgatcatgccactgaactctctagcctgggtgaaagagtgagaccctatctcaaaacagacaaacaaaaaatgtggtaagctgcaattgagacctatttacaaattggtgtatgtctacaatctgagtaatatatttcttctctttgcattttgctaccctgacatagaagagtttgccaggctactttcattgttgctgaaggtctttacatattacagaaagttgctgcaaatcatttacaaaagatgatttaggcaggtttaaattaggcaactcgagtagggatcattatggcggatgggaggcaggactagattgtagctccaactcgaatggacagagcaatgggcggaggctcgcatagtgaattttagctccaaattgactgcaagaacaaatcggcaatcttgagagaacccacagactctctgtctcctgcaggacccaggagacaccccaaatactgtgagcgccccaactgcagaagtgggaaagggagatccttttcccctgaacacacacccccactggagaaactaaaggtctgtttgcgggagaagtttctgaccttacctggagctgagtcaagttagagagccaagcgaaatacaggggtagaggaagcactgggaaaggccttgggaactcgctgggtccccaagcaggccattgctgcctggcaccgcagggacccattgggagagcagctagagtggggggatatgctacagggagaaggaaatctccagctgaactggggcgagaagcctccccgtcagaactcaggggagggcatgaatccagggtgcagattccacaggcaggggaagaaccatgcccttttctttcgcagctgggaggcaggtagcccggggcaagttctcaagcctgtgtcgcccactgcttggaaacagactctgttagtggtgcatggtgggagtgagactggcccttttttattgcatgggagctgggtgaggcctgtaactgccagctttcccccacttccctgacaacctgcatgactcagcagcagccacaatcctcctaggtacacaactccactgacctgggaaactcacctccatcccccaaagcagctgcagcaagacccgcccaaggagagtctgagctcagacacacctaaccctgcccccacctgatggcccttccctacccaccctggtagtgaagacaaagggcatatgctcttgggaattctagggccccatccacggctggttcctctccacagtaccatagctgatgctctctggaaagtgctacctccccggcaggaggccaaccagcacaaaaatagagcattaaaccaccaaagctaagaaccctcacggagtccattgcataccccctgccacctccactggaacaggtgctggtatccatgactgagagacccatagatggttcacatccaggactctgtgcagacaacccccagtgccagcctggagccgggtagacttgctgggtggctagacccagaagacagacaacaatcactgcagttcggctcacaggaagccacatccataggaaaagggggagagtactacaacaaaagaacaccccgtgaaacaaaagaatctgaacaacggccttcagccctagaccttccctctgacagagcctacccaaatgagaaggaaccagaaaaccaactctggtaatatgacagaacagggctctttaaaccccccacaaaaatcacactagttaccagcaatggatccaaaccaagaagaaatctctgatttacctgaaaaagaattcaggaggttagttattaagctaatcagggagcaccagagaaaggcgaagcccagtgcaaggaaatccaaaaatcaatacaagaagtgaagggagaaatattcaaggaaatagatagcttaaagaaaagacaattaaaacttcaggaaatattggacacacttatagaaatgcaaaaagctctgggaagtctcagcaatagaattgaacaagtagaagaaagaaattcagagcttgaagacaaggtcttcgacttaacccaatccaacgaagacaaagaaaaaagaatatgaaaatatgaacaaagtctccatgaagtctgggattgtgttaaacaaccaaacctaagaataattggtgttcttgaggaagaagagaaatctaaaagttgggaaaacatatttgggggaataatcaaggaaaacttccccagccttgctagagacctagacatccaaatacaagaagcacaaagaacacctgcagagttcattgtaaaaagatcattccctaagcacacagtcatcaggttatccaaagttaagaagaagggaagaatcttaagagctgtgagacagaagtaccaggtaacctataaaggaaaacctatcagattaacagcagatttctcagtagaaaccctacaagatagaagggattggggccctatcttcagccgcctcaaacaaaacaattatcagccaagaattttgtatctagagaaactaagcatcacatgtgactgaaagatacagtctttttcagacaaacaaatactgggagaatttgccactaccaagccaccactacaagaactgctaaaaggagttctaaatcttgaaacaaatcctgcaaacacatcaaaacagaacctctttaaagcataaatcacacaggacctataaaacaaaaatacaagttaaaaagcagaaacaaaaaacaaaaaacaaacccaaagtacacaggcaacaaatagcatgatgaatgcaatggtacctcatatctcaatactaacattgaatgtaaatggcctaaatgctccactttaaagctacaggactggagaatggataaaaactcaccaaccatctgctgccttcaggagactcacctaacgcataaggactcacataaacttaaaggggtggaaaaaggcattgcatgcaaatggacaccaaaagtgagaaggagtagctattcttatttcagacaaaacaaactttaaagcaacagcagttaaaagagacaaagagggacattatataatggtaaaaggccttgtccaacaggaaaatatcacaatgttaaacatatacgcacgtaacactagagcccccaaatttataaacaattaagaacagacctaagaaatgagatagacatcaacacaataagagtgggggacttcagtactccactgacagcaccagacaggtcataagacagaaagtcaacaaagaaacagatgaatttaaattataccttggaacaaatgggcttaacagatatatacagaacatttcatccaaaaaccacagaatgcacattctattcaacagcgcatggaactttttccaagatagaccatatgataggccataaaatgagcctcatataatttaagaaaatttgaaattatatcaagcactctctcagaccacagtggaataaaactggaaataaactccaaaaggaaccttcaaaaccatgcaactacatggcaattaaataacccactcccgaatgagcattgggtcaaaaacaaaatcaatatggaaattaaaaagttcttagaaccaaacaacaataatgacacaacctatcaaaacctctgggatacagcaaaggcagtgctaagaggaaagttcatagccctaaacacctacatcaaaaagactgaaagagctcaaactgacaatccaaggtcacgcctcaaggactagagagataagaacaaccaaactcaaacctagcaaaagaaaggaaataaccaagatcagagcagaactaaatgaaattgaaacaaacaaacaaacaaacacatacaaaagataaatgaaacaaaaagctcgttctttgaaaaggtaaataaaattgatgaccattagcaagattaaccaaggaaagagaaaaaatccaaataacttcattaagaaatgaaacaggagatattacaactgacaccatggaaatacaaaagatcattcaaggctactatgaacacctttatgcacataaactagaaaacctagaagagatggataaattcctggaaaaacacaaccctccaagcttcaatcaggaagaattagataccctgaacagaccaataacaagcagcaagattgaaatggtaataaaaaaatctaccaacaaaaaaaggtccaggatcagacggattcacaggataattttaccagacagtcaaagaattggtaccaatccttttgacactattccacaagatagagaaagaaggaaccctccctaattcattctacgaagccagcatcaccctaataccgaagccaggaaaggacataaccaaaaaagaaaactacacaccaatatccctcatgaacatagatgctaaaatccttaataaaatactagctaaccgaatccaacagcatatcaaaaagataatccaccatgatcaagtgggtttcataccagggatgcagggatggtctaacatccgcaagtcaatacatgtgatgcactacataaacagaattaaaaacaaaaatcacagccaggtgcagtggctcatgcctgtaatcccagcaccttgggtggctgaggtaggtggatcacctgaggtcaggagttcaagaccagcctgatcaacatggtaaactctgtctttactaaaaaatatttaaaaattagccaggtgttgtgccgggcgcctgtagtcccagctacatgggaggctgaggcaggagaatcgcttgaacccaggaggtggaggttgcagtgagccgagatcatgcaattgcactctggcctgggcgacaagagtgaaacttcgtctcaaaaagaaaaaaaaaatcacatgatcatctcgatagatgcagaaaaagcattagacaaaatccagcaccccttaatgattaaaactctcagcaaaatcagcatacaaagtacatacctcagtgtaataaaggccatctatgacaaacccacagcccacatagtactgaatggggaaaagttgaaagcattctctgcccccgagaactggaacaagaaaaggatgcccactgtcaccactcttcttcaacattgtaatggaagtcctagccagagcaatcacacaagagaaagaaataaagagcaggccgggtgcagtggctcatgccagtgatcccagtactttgggaggccaaggcaggcggatcacaaggtcaggaatttgagaccagcctgaccaacatggtaaaaccctgtatctactaaaaatacaaaaattagccgggtgtagtggtgtgctaatcccagctacacaggaggctgaggcaggagaattgcttgaacccgggagatggaggttgcagagagccaagatcgtgccactgcactccagcctgggtgacagagtgagactctgtctcaaaaaaaaaaaaaaaagaaagaaaaaaaagaaaaagaaataatgggcatccaaattggtaaagaggaagtcaaactgtccctgtttgctgacgatatgatcgtttaccttgaaaaccctaatgactcctccagaaagctcccagaactgataaaagaattcagcaaaattgctggatacaagattaatgtacacaaattagtagctcttctatataccaacagcgaccacgcaaatatcaaatcaagaactcagccccttttacaatagctgggaaaaacaaaaaacaaaaaacctaggaatatacctagtcaatgagtctaaagacctctacaaggagaactacaaaacactgctgaaagaaatcacaggccaggcgcggtggctcacacctgtaatcccagcactttgggaggctgaggcaggcagatcacctgagctcaggagtttgagactagcttggctaacacggtgaaatcccatttctactaaaaatacaaaacattagctgggcatgatggtgtgcgcctataatcccagctcctcgggaggctgaggcaggagaatcacttgaacctgggaggcggatgttgcagtgagctgagattgtgccactgcactccagcttgggcgacaaaactagactccatctcaaaaaataataataataataataaaataaaaataaaatatccagaatctacaacaaatttaaacaaatcagtaagaaaaaaacaatcctatcaaaaagtaggctaaggacacgaatagacaattctcaaaagaagatatacaaatggccaacaaacatatgaaaaaatgttcaacatcactaatgatcagggaaatgcaaattaaaaccacaatgcgataccatttcacttctgcaagaatggccatgatcaaaacaccgaaaaacagtagatgttggtgtggatgcggtgatcagggaacacttctacactgctgctgggaaggtaaactagcacaaccactatggaaaacagtgtggagactcctcaaggaactgaaagtggaactaccatttgatccagcaatcccactgccgggtgtctacccagaggaaaagaagtcattacatgaaaaagatacttgcacacgcatgtttatagcagcacaattcacaattgcaaagtcatagaaacaacccaaatgcccatcaaagagtagataaagaaactattttatatatatatgtgtgtgtatgtgtgtacacacacacagtggaatactactcagccataaaaaggaatgcattaacagcattttcaggcccgacgcagtggctcacacctgtaatcctggcactttgggaggccgaggcgggtgggtcatgaggtcaggagtttgagaccagcctgaccaacatgctgaaaccccgtctctactaaaaatacaaaaattagctgggcgcggtggcaggcgcctgtaatcccagctactcaggaggctgaggcaggagaatcgcttgaacctgggaggcggaggttgcagtgagccgaaattgtgccactgcactccagcctgggcaacagtgtgagactctgtcaataaataaataaataaataaagttaacataaaaaaaagaagaaacacagacaaaaaataataaattaggcaactccatagccatttttattcttgaaaaagaattaccttgtgtgtaaagggaattttcttttatttccttgttttcttgttttgttaagagatagggtctcgtggtgtcacccaggctggtgccatcatagctcactgcagccttgaactcctgggctcaagcaatcctcccacctcagcttcccaaatcactgggattatagacctgagccacccaccgtacctggcctgtgaagggaatttcctaaatgagtttgaaagtttaagtcgtgtcatacaaataagtgatttcagcctcctaggctgccaggaagctcttaatataagtttgctaagtaaattcctgtgaaaccgtagcctgtcagctatccaaaccatactttgtaatttctctgaactcatttcattaattctcaaaatgatcatggaagatctactgtcattttcttgaaaaattaaaacataaaatgcttattaaataaacaatcaatacgtgatgtggacaagtgaacagtcatgctttgttggtgggaatgtaaaattgaggctaccttcctggcaatttggcaatccataagagtttcagaaattttatatcccgttatccttctaaaactctttcctaaggacaaatcagagataaggataaagatttttgttcaagaatatttgctgttaggacatttataaaaatgaaaatttagaaccatctcaaaagtctaataatagagactttgtaaaataaatgttagtgcatccacctgatgcaattataatatagctgttaactgttcacaatatcatattatttttaaaatgaggaacacaaaattatatttacagtgtgatcccagtttttttgttaaatatacatctataacacacacatacgcttataaggacttatacaagactattaagagtaattatctttgggtgatggattatgggtgatttgaattttttgttattctctatagttttaaaattctctacaatgaatagacattacttctaaaataagtgatacttattaaaacaataaaaatatttaaaaatcaaccatctggtaacattccattttcattacttatgtagacttaaaagactataatcatgaaatgaccttagctaaaattttagagacttttaatcaagggtatttctgaaatagtctatcgattcgtagagagtgtagccgatgggcttcattagtgccttttttttttttttttgagacagagtttcgctcttgtcactgaggctggagtgcaatggcatgatcttggctcactgcaacctccgcctcccaggttcaggtgattctcctgcctcagcctccccagtagctgggactacaggtgcccgccatcacgcccagctaatttttgtatttttagtagagacggggttttgccatgttggccaggctggtcatgagccattagtgcctttcaatcactaagttatttggttcatgacattgtcttgattaacccaacagaaaaaaatctgatttagtccaacacacgaactaccactaatcttattggtgacaagaagctcctgataaggatgagctgaagaggtgaaaatgagggcaagttttgggatttaacttcactgaaaccattttctttgaaggattggatatctgatctgatgtcgtttacttcagatctttgaacaaatcattacacaggtatgtttgggaaggaaggagttaagtctaaaaagagtgcttgattcaggatttgttttggaatcacttatctattgggttgctgacagcaataaacattttctaaatacctaaaggaatgaaagtagagtgtcacccagtgagaaggtggcaggtgaaacttggttatttctttatattagttcggctgaatgttagagttaaaaaaaccctaaaacaaaacaaaacagataaaagttgccttttaaatttgtcacacatctgtcgctggtgtgtggtcctttatagtgtccaagatggtctatggaagatatttattttgtaaaacaaagttcgaaaaggcaaagagatcatcaacttagaccaaacatgcaataactcctgtaaatggattgtcagcaggcattgacatacattgtctattttggccaggaagaggtggagttattctcaaggttaagtaaaggtcatctctctctaccatactgccactcagcagtgatggaaaagcaaagcctgaagttgggtactgggaaatttcacttgggagacggatggcccagtctgtctgtgcactcaggtcatcttggttagttttcccataattgtactagatcagcagtcaagtgaaatgccagattcatcactgatagaatctctgtcctgggttgacagtcctttaatttgtgtgcctttgtggccagaggccattatttctaattgcctttttgtcctgtagcagttcatctatctttcacacacaccaaatttaatcttcatgttagacaatgatggggaatttgggctgaagttgttatcaaatgagtttcataagctttagtaacctcagggaaaaaaaatcttaaaagacttaccaaaatttgaaaatagtaaacaatgatggctttctagtaatttaaggttgttacaggatctccatactgataattcaaaatatctgggtcaatgatttgactccttaacgtatgaaaaaaggcttacacttctcttattgcacctacaatttaattataacacatctgatgatttctgataggaatgtctgattttttttttcttcttcactcaacaaccatatatatatatggtagctaccttgaggtaggcactgagacccaagatgaatcaatcaagtccctgtgaagacaaatgaaacagccgagtctgcctttggaccaggttgtgtaccacagggtacattcggagagaaatggaagcccgtctgggggtgtgggtagggccagggaacatggagggagcagcagtgagaccatgggataggctctgtgaataccaggagttttacccactccacctgattcagccctggggatagtggagagaggggtctccatctaacaggtgaggaaacagagcattaggcggtgatatagtttggctctgtgtccccacccaaatctcatcttgtagctcccataattcccacatgtggaaaagaccagtgggaaataattgaatcatggaggcaagtctttcccatgctgttctcgtgatagtgaatgaatctcatgagatctgatggttttaaaaacgggagtttcgctgcacaagctctctctgcctgctgccatccatgtaagacctgacttgttcctccttgctttccaccatgattgtgaagcttccccagccacacggaactgtaagtccactaaaccccttttcctatataaagtctcaggtatgtctttatcagcaacatgaaaactattacagggggtgaacactcccatggcctcacacagcaagaaggaagatgggagcacttgagacccagtgtccagatttgtgagttgagttggtccagctgagctggggtgatgggaagcagttggggtcaggaagctgcacaaaggtcccagtcgcccagccgaccaggacagaaaatgctgaactgtgaaactatttgggacttgtcttttttttttttttttttaatggaaaggacttctctgcacatgcgttcactttcctgcccatgccagcagctcagtggccccatttttcgggtgaatgttgcaggcatggtataaaacccattccatttcccgcattaactttgcacaagccacatggtctcttttctctcagatccttcacacggctgttgtgaagaggggtggaagagaaatttacattccaaccttcagagacaagtcagccaaattatgccaaggcctctgtccctccatctgtccatccatccgtccatccattagagccagggcaagtagcatagggctctgggtggacggcccccaagatgtgctttacctccaccgccactttctctgcctggcttactcattcactgggcaggtatttatcgagggcccttctgcataccaggcctcctgcctcagcctcctgagtagctgggattacaggcgtgcaccaccctgcccggctaatttttgtattttcagtagagatggggtttcaccatgttggtcaggctggtctcaaactcctgaccttgtgatctgctcgcctcagcctcccaaagtgctgggactacaggcatgagccaccgtgcctggccttaggtagttctttatagcaatgcgagaacatgtccttagaggacagaggccatgggaggtttgatggatactgaaggggagcacccacaggaccactgaggcaggcagtggcgagacgcagccacaaaccaaggctgtgtgatgtagcgtaaggctggacaaggccaggcagtgtcccctcccacttccggagggagtttggccctgctgaggccttgatggctctgaagctcatctcagtcttgtgacctccaggactgcgagataatccatttctattgtttaaagccacttagtttgaggcgatttgttactgcagccccaggaaacaaatacaatgatggacaggaattggtggagatgaagcagtttccagagtggtgaacacagtgaggaaaagtgtggggtacaatagcgattaccattactcaaggcctgactgtggcccaagcacagttttaagcattttatatacttcctgtttcccagtagcctacacaataagtgatgttttacagatgaagaaaccgagctcagagaggtaatgtaacctgcccaaggtacactggcaggaagtagtgtagctgggacttgagctcagttctaatggattcccaaagcccatgctcttttcactttgctccttggaggttggccacttaagtgccatttgtttatttattcattcactgtttgtctatttgaataaaaatactgagtttttatccactatttgaataaaaatactgagttttgttagtattccaagttgcaaattaaaactacataccattccttaatttcttagcaaaagtgggacaagtggtaattactgagccactttctggcatctggcctactttttgttgctctattctgggccaccacatgcctcgttaaaaatggggaactatttcaaaggaagatggggagaacaaacacagagatgtcagaagcctctgccacagggtgtgtgcccaaacccagcagtgatggctgcgggtgctgagactgggacaggtggacagagaccaatacagttggtgtgcagcacccatggaggagggccttgaatagcgggttggttgagacacggtcctttggacacagagctccaagccctgtgagcctttggcagtttgtgagggaggggagggaggaggtggaaccataagcctcgataaggcacaatggcagtgacagcaaataccatagattaaaaacaagtatcctcttccattttctttgatagaataagcataagtaacccaaaggagggtcaggaaatcccacaataaatgactctgaaatgtctgttaataatgaaccgtggaaaatcaaagcatattcagttagactaggaaaaatggaacaccatgatattttgtatactccaaatttgaggaacaatacataagggtacatgggtaatccccagtgttggtgagttacagggagtaaactgatagaatccttttggagatcactctggtgttttatattaagtgtcttagtctgttttgtactagtattatttgtattagtccattctcacactgctataaagatactacctgagactgggtaatttataaacaagaggtttaattgactcacagttccacatggctggggaggcctcaggaaacttacattcacggcagaaggtgaaggggaagcaaggcgtgtcttacatagtggaaggagagacagagatagaatgcaggggaaactgccacttttaaatcatcagatctcgtgaggcctccctcactttcaggagaacagctttggggaaaccactcccatgatccagtcacctcccaccaggtccctccctcaacacgtggggattaaaattcgagatgagatttgggtggggacacagagctgaaccatatcaacattcaagctctttgaccctgtagtaattccaatacaagaagcctagcccaaggacacaatttcataaagtttatccacaaaagatgtttgttgtactcattgtttaaaataggggaaaacaggagacagcccaagtggctagtgtctgggagccatcatgtttttgcctcaacaattgcaacacttcagtctttttggggtagtagtgaggaagccacttctgccactctgtcttccctatattcttttttattttttgagatggagtttcactcttgttgcccaggctggagtgcaatggagcaatctcggctcactgcaacctccacctcccgggttcaagcgattgtcctgcctcagcctcctgagtagctgggattataggcgcccacctccacgcccggctaattttgtgtttttagtagagacagggtttctccatgttggtcaggctggtctcaaacttccgacctcaggtgatccacctgcctcagcctcccaaattgctgagattacaggtgtgagccaccgcgcccaaccccccatattctttatacccctgggaagagctgtgacttagccgatgggtgaaaacgagccaagagtgactgcatggagttgtctgctatccacctggccctgccacctcctgagcatgcagctggtcaggccatgtctccaggtctgcaggcccagtcctcctcacatcagtccccaagtctagatttagggaagaaagcatgattttggcttcaggcttatgcagcacttgaaaatcgggctccatcagcaataaggtagacactgcattttaattcttgccaggtgcgtaagtccttcacagaatggtggtgaggagtgagtgactgaactttccccaggatgtgcccacccatggtgcattcactgagaacattcaaaagaggttgccttagaaaccaaagtatcacagggagagatgggcctcttggggcagcagcagcagctgaagcaggctgactcacagctgcttctaatatgctaggctttgtgtaaacaggctttatgacacaagtgggctgactacagtgcaattggagtgtggcatctgagtcactgtgaggctctagctggcttcttccagccctggccatagggtcccctgtgactgtaacctatacaagcagagcttgggcatgctggatttgcagaaataaccttaggcaggtattgaattattggacattaacttcccctgcattgtgtgaaaatataaatcttggtccacaaatgcccttgttcaagactgtattttccacaatgccatcatttctcactctgtgagtcctttggtccctaattgagatttccattgcatttctgacctctgagacttaagtggtgatgaggcacagagaggaaaagaatatctggtcctcagtcataggtccagataggtaatcactgaaacatccactgtgcttgtccatgtggccctgttcagatttggtggctacctcaaagtgcagttctttgaaaactaaactgttatgttaagccattgacaatttaggattattatttatttatttattttaccatggaatgacaaactctcctgactagaaaaggtgggataagtacatttcctcccaacccaaaatagtaaatagtgccaccatgaacctaattgtgttaaactgagtgactgagacccatgaaaactgccatagcctgacctgcaccccagcacgatgaatcaagaagaatctctctttcctcttccgttttctgtcttcctttccccatgtcccatcaagtctgttctagttactggctggtgggtctgtactatacaatgtactgggttccatcactattgctgtaggagttgatttatttggattttcaaagttccatgggcatgggactgttaatatgacattttcatatagcctactgaatctttaaaaaactgggagatgcaagaaattttgggttgggtcaatgtgcttaaggaatgactcccattcttatgacagcctaggcagcagcttcctgaggaaacccaaacatctgattgagatccttttaactaaaacagggcaggtcaagaaattagggggagcagaattttggatttaaattatgttggcttttcattaggtgatttcatacttgggcttttatttctccctgggagttgaatcactggagaaggttttgttaatatatggaaatttttatattattgacactttctatttggagtattttaggctattatttgggctcattgcagaacagtgtctttcaaacttttttcttaaattaggacatgcattatacatcatggcagaagcacaatttttacaaaacaaaaacatctcacagcctgggcaacacagggagaccctgtcactacaaaaaaaaaaaaaataaaaagattagctaggcatagcggtgcatgcctgtggtcatagctacttgggaggctgaggtgggaggatcgcttgagcctgggagttcaaggctgcagtgagccatgatggcaccactgcattccagctttgatcctgtctcaaaaataccaaaaacaaaaaacatctcagctggagttctgaaagcagagactgggacaaaggcttgtgtgcaggcaatttactgggaaagtgaccacagagagcagggccaagtggcagagggtgcaaaacacatcagacagacaagcacgtgggctgagtccaccaccatcgtggcaaccgcagttcaatcccatgagaccttctgaggagctcatggaatgcagtgcagaactgtctcctccgggctgaaagaaggatgtgtatatccactgatacctctcccaggttgggctccaggctggtcctgtgggtgttaacccctctccttccagagtgtactataagaggcacctatgtggatgtggttaaatttgcatgaactgtttggggcatcagtggctggagtaagaggtgaacagagaggctctgaagtggttgaaacagacgttcagtcaaaatattcacccttactgagtgcaatgcactgacatattctattctagttcatcacacacacactagtggaggcccactaaccagtggttctcaaagtccgggggtcccaagaccatatttcagggggcctatgaggtcaaaactattttcctaatactgctgagatgttttgtctttttcatcctcgttctctcatgactatgcagcggagctttccagaggcttcgtgacaggcgctaatgtcacagactgaatgcacaagcagatatgagaaacggctgtgttccatgaagccagacattaaagagacttggagaaatgtaaaacaattctacttgtctcactgaatttttttgttttagaaaatagttatttctcatgaatatgtttatgttaaatttgtccttttagaatcagcttagtattactacaatgatttgggtgaaatgtttctgtaacagaaattttgtttctcattatgtgatgagttaattttatatctaaaaggtaacgtattatttataaacaaatatttaaaaattttctattttaatttttaaatatatctacatacacaaaaggtctttggggctctcactctttacaagaataaaggggtcctaagatcttaagaaaagatagagaattgctacactaaactgatcatgaccctcaaaaacactgctgcccatagtttgcaaaacattggtgttcctttcatgacctgtaaggacagagtggttggaaaccagaatgaaaagttaatttgaggcttaatgtgcaatagaacactagagtccatgaaggttctatcctgacctatttcaaacccgtctcaggcccatcacctgtccgaggggaagacaagggaatactgctgacatgagcaagagtctcacagatgggagggaaccgctcggataactgctggctttctcttccaaagcttacagctactgccctgcttgaccaaaactcagttaagtctaatcatgtaagggagtccaatcatgtaagggagtccaatcatgtaagggagtccaatcatgtaagggagtccaatcatgtaagggagtcattctcgaccctggctgcatattggaagcatctggaagatgttaaaaaattacccctgcctgtgctctactccagaccaatgaatcaacattttctggaggtaggcataggcactgtttttttttcccctttttattgaggtgtaacttgcatcagaagcagaaatcttaataacttaatgattttttaaaaacatgtattacctccatgtaaccataaccaccacccagatcaagatgtagggcattttcaattcaccagcaggctccttcatgcctcctcctagataatactcttctccaaaggtaaccattattctaatatttgccaccatagattagtttttcctgattttgaacttcaaataaagggaaccacgcagtagtttactcttttgtgtctggctttttttgcccaatgttatggccatattaattcatattattaggtagagaagtaatgcattcttgtttgcatggctgtgtagtgttcaattgtagaaacagaccatgatttatttatcattctatacttggtggagttcgctggttcccttacactgcttttttttgtttcttttttttttgagacggttgccaaggtaaccgtctcgctctgttgctaaggctggagtgcagtggcatgatctcggctcactgcaatctctgcctcccaggctcaagcaattctcctgcctcagcctcccgagtagctgggattacagacgcctgccaccacgcctgactaatttttgtatttttagtagatatgaggttttgccatgttggccaggctggtctccaactcctgacctcaggtgatccagctgcctcaacctcccaaagtgctgggattacaggcatgaaccaccacatccagtccccttatactgctcttaagtgtggtgacatgctctcaccataaaataacaggaactgggacaaactagggaacaggaaaagcagattcatgttatccatctcatgcttactgggtaaggatatggttattgtccccttcccagctcctcctctgaatctattcttcattcaccaatcaggatgacttttaaaaacagaaatcaggccatgtcattcctttccttcaagactcccaacagcttgatcctaaagtgcctcaaactcatcacacttacacttaaatccacacttcctacaccagcctacaaagcccttcacaatctgggcccggtctctccaggctcacctgggaccacattctctcttgtttggtatgctctatgcccaatgccagtcttctctctgttcttaggacaaaccaagttccttcccaccttatggtctttgcctcacctgctttatacttagatcccaacagcctctctctgagaggccttccttgaccacccaatgtgaactagtcatccctttgcattctagaatacattatcttaattctttgcatagcactcatcaaattatatttccttgtttatttgcttagttgcctcaccctgcttctaaaactataagctctttgagagagaatcttaccattacttcatcctcagtgcctagaaaaatacctggtacacagtgagtactcaacaaatatttgtgtcttagacatgaatctgatggcacaagtactaactgtacccttcccaaaaactaagggtttgaattctgggcccctcaggacaaacaggaggaaggacatcattgccctttgcaaattacaatataaatgcctctctggaggaacttcttgattatactgacattgatttttttttttaagtctgctatatgggaatgcaatattgtatttattctattcattaacaatacttgaacatttacaatattcattgaacataatctaagagaaggtcaacttacattttttacttctctattaataagagagatggtcaaattaatttatggtcaaaattataatggcaaaaacttataaataaatacgtgcttggtgttactatggttacacacagttcagtttttggtgtaaagttctttggctgcaagaaagaacatttggtttacttcactaatagaaatatctcttaaggctggaatggcctcctcttggtatttcttctgctgttgattttttgcatagttatctgtaagaaaagaccaaaaagctctgtttacctaagcaatttcttctacagtctctgtgtctgatggagacccaccacatagtttactaggctgacgtttggatagtgacaaacatcatgtttaacataattagatgattacttaaatcctctctttagaagaaatgtcccaattaaaataaaaacatccctgtctctactaaaaacacaaacacacaaaattagcctggtgaggtggcgggcgcctgtagtcccacctactcgggaggctgaggcaggagaacagcgtgaacccagggggcggagcctgcagtgagccgagattgcgccattgcactccagcctgggtgacagagcgagactccatctcaaaaataaaaaataaaaaataaataaataaataaataaaaataaaaaaataaaaacatcagtaaagtacttttttcatctctaacttggaaagaaatcaatattttaatcaaccatacaatgatgattaaagtctcatttgcacatttctcacgggaacagaattatatccaggccttgaaaatgtatttaaatcaacatggcaaaactattaaatcatttggtataaatattcatgcaatcttaacaatttcccctctttgcacaaattacctatttgctgccaattccaatcaagaatgcatggaatgcagtgtattagaaagacacttaaaaataatagaattgattttcaaaatacattgtagaggctaatatataaaggttttgaaaagttgaaaaatcataccagggaacttaaaaaatactttactttctagaatttaagcaagctcaggagtctgatttattttcatctttagacttgaaagaactttaaaaaaataaaaccagacgaacgtgttgtggctcttttatccacttaattggaataaggagtacacaatgatcctgaggaggatacacacccccaaagtcctttttctgaacaaggtctgcatgtactatttactatcccttgatcaacggtgtctgttcaggataagcttctctcaggcaaagttaatgggaacatattatagacacatatagcatatacttgtggtttttatgggaacatacacctgctaaccagtgctataattaattataatttatttcctccatgaatatagctagtgtgtattcatcagaacttaattccttcatgcaaatatttccttttatataagtttgtatttatttctcttagtagcttctttttactgtccgtgtgtgtgtgtgtgtgtgtgtgtgtgtgtgtgtgtgtgtgtgttttcttttaggatggagtttcactcttgtcacccaagctggagtacagtggtgggatcttggctcactgcaacctctgcctcctgggttcaagtgattctcctgcctcagcctcccaagtagctgggattacagacgcgcaccaccaacatgggttttgcagcctgttctttgttgcttttctgggtaaaagtgctaatactccactctttcattgccccagcactttccttttatataaagttacctgtgattgtatggatggagtcgagtggagaggtactcatcatgttaatcccaaacaagagcacgtagccaattactatagcaataaggaggtagacaggtaatgcaactgcccaatatctgccaaagagaatattaaagtacataatagacactttaaaaaagttgtaattctcaagagtcggtcacaaagccaacatgttttttaaatttaaattttataaagtaatatgtgtacataagagacaaatagttccacaaggcttacagtgaaaaactgcagtcctctatcccaccatcccaaccctggggtctcactctccaaaaagaaatgctttgagcacttgagctgtcttctggtacttacctcctcattgctacaaaacatgctcatattactatttcctcatttttttccattacagacattttctctaggcttcctaatatggagataaggaattaacctcctcctatcctcttctatacttacattgcaatttctcattatagcagcaggttttagaaataattgtacctacataaacaattttgcaactgaggatcttagtacattattattatatattttcttgtacaacttttttttttctggaataattacatctttttgtctgttcacttggtttcccaggaatccaccaataccagagcctcaaattctctgataggactctattatgcctctcagtatcattatgtacatggagtgctatttttcattgagtgttttttttttctttttgagaaagcatttccctctgtcacccaggctggagtgcaacggcatgatcacagatcactagcctcaatctgctgagctcacttcagccctgcaagtagctgggactataggcacacaccaccacacctggctaatttttaatttttttgtagaaatggggtcttgagatgttggccagatgtttttttttttttaaatgatttgttctctattattttctctttctggaacttctaatagtttgaatttttaacgattatactttcttatattttcatttttttttgttctaacttctagagattacctttgttttattttccagtctttcaattaaaattttaattttggttatcatgtttacaatttccaaatacagtaatttcctgtttgcatagcattctgttcttgtttcatagttataattgtttcttacctctgagaattttatgttatttaaatttttttttctgtttcctgcattatctctatttccttcaaattccctttaattttctgctttttcatttcatgctagaggctttcttttaatgtctggtaacttagagtagtccattcatatttaaaaatgaagtgctaacaagtgagttggaagcactatgtgtatgtgggcagggatggtcaactggtgagcctcactctgagagacttggccacttcactggggtcctctaaatgtcagaaattatagatcctttctctcgggctggtcagcttcctcaggaaagaactatctatctttttctgtgagcagtagggtgatataagcctcgaagccccaagagggaagatggagcaggaggtaaatcttctcattaagccatgtagattttcacttacttccctgttttcagtaagatgccgcattcccacactcagacttagtggcccccatgctagagactcttacttaaccttgccagagagtaaaactcctgttttctgcaggggagggcagggcaggcctcccagctttgagggctgagggagatttgaaggctgaagacttcatatggtctttaaacatgttttcagttcaacccagaattaaagagctacctggtaccccaatgtctgagctattctggagttctaaggcacaaatattcttgctggcttccctacttcagcaacgtgaaaatcacagaaacaaaggcagttacctctcacctatcacaatccactttccaaaatgtggttgatatctcttttctgctatactattgtttctgtggtttgtatcttcagttttttttttttttcctgtagggtcattttaacaagatttttggaggaaatggatggagataaacatgtgtgttcatgctaccatctttaattagagatgtatcaatagcgatctttaaaaagctttcaatttctatatggctattcatgaattttaagagaacaaatatttaagatttgggtaggtttaagaaatgatatgactcctcaaaacagcattaattatatcctcatttaagaaatatattaaacttacttttgaggccaataggttaaacctaaagagtttagccaagattcaggaataaaggcccacacgaggtaaagtactgtagaaaagaaaaagaaaaaaaagaggaagagaagtcagtaagacatacatctaatctatcaatctattaagattcagataaaacagaaaagctcttttgaagtgtccctgattaactcagaaatgattttttcctcctttcagttcttctagctcgtttgcacaattcttataatacttataattactgtattagtctttttttttaatatcttaactcacattatattttaagcaattcaaggatacaaatcatggcttagcaattgttgtaatccttattacctagcagtttgctttaggtacagtaagtgttcaatacttcatccccacaaggttgaagtaattatagacatttaattgctcaaagggaaatttacctaccctagttctcatccaccacatactgagcttctgccctatctcccagagtacaatgttatttccctcaatccgaaatctcggcactctttactgttatcccacgataacaacaatggctaagttctgagcactcactgtgggttaagcacagttccaagcattctgtatgcattaagataatcctccaagacaatcctccaaggcaagtatgcaattttaaatgatgaggaaatggaagcttagaaaggatacatcacctacccaaggtaagcggcaaagataaattttaactacctactacatcagtgatgatgcattcttttcttaacaaatatgtattacagaattctgtatgtcaggtgtgtgagacacaatattgaatccaaaagagatggcttctgccctccctaaacttaaaatctagtggtgaatagagaaaattggtattttcactacattgttacaagtgctcacgaatgagtaataaaagatgacatagaagcacattagaaggccctccttccacttcgtatcctccttccctttgcttaatttctccccatagtacgttatcacctgatactatatacgtttttcttatttaacttgcccattgactatctccccccggcatgagaatgaagactcaaagcagggcatttttggctgttttggtccttcctggcctgtaacagtgcctggcacatggtaagcaccaataaatacttgaattactttttggttgtgggtatgatggaatttaattttgttttgagacagtttcgctcgttgcccaggctggagtgcaaaagtgcaatctcagctcacggcaacctccgcctcccgggttcaagcgattctcctgcctcagcctcccgagtagctggagttacaggcatgcgccaccatcccggctaattttgtatttttagtagagacagggtttttccatgttggtctggctggtctcaaactcccgacctcagatgatctgcctgcctcggccacccaaagtgccgggattacaggcgtgagccaccaggccggccagaatttaagccttaaagtgattgcttttatttattcatatagcttctaatccttgacatactctttgaacaaggatttacaaaagtgctaacaataacatcagtagctaacacttattaagtccctaactgttcctaggcattattttacgtgctttacataaattacccccgttaatcctcacaacagtcagaagaggcagcagagtgaagtcagccagtgtatttgggttcaaatttagaaggcttttatttagtagctttgcaatcttgagcaagttactgaaaccacaggatgctcatctttaaaggacagtaataacagaacctaccccatagaactgtttcatgcgtcataagcatttaataaccatcattatcactacccttttacagataaggaacctgaggctcaaaaaatttgctgagggtcccagctcacatggctaatctgtggaggagtcagaattcgaactcagttgtaacttcttcacttcacttcagttttaatagcctggccattacattcatctgcaagctgtgctgatggtgcaggctgatatattttagttagggttcagaagtactaccactcctccactttcctggtttccaaacagttgcagaacgttggatcacgggcactcaattttctcccttttgtgtgcctcaaaattctcaaatcattttggggagagacttgggacttgctgtgtgagtgggcatattagtgtcttagtgagcatcagtctccttatctgtaaaatggaatgttatggggttaaattaagggagatccaggacgcaaacgacacacctttcaacccgacttctctggcctacttctcctgttccccagatcccgcagggcacactggtgacatcacaagctcctcgggtccaaaccctctcacgccctcattcaaggcctttccacttcttccctccctcttactctttcctaatcagcatcagtgccagggggaaaggcctctgtagaaagccttgactttccagtctggtttcaatgtctctccaccgtgctccctgacactcatcacactgagcattaactgtagatttacccatctgtctcctccacaagaccacgacctccttaagggcagggaccaggctttatccactttgccatcgcgtctggtgctgtataaatatttgtagagactaaaacctcctaggctagtgctggcacacggaacactcagcaaacacgagatcccttcagattttcttaaaaagagacatagggagaaagaatcaacagttcatgtgtgcacagtctaaccaatgtattcttcccttgtcactgaacgccagaaaaagcccctggccatccatcaggaaagtacttactgaagccaaattgggagcttaagaaaagaacaaagccataaatcgctctttctggcaatggcgacggtgaattttccaccatttttcctggggctttagacaatctgtggaaaaggaacacaatcagcgtcagcgatgtgctccgtggcaccattgatccattctcgcctcctcgctccgccgcgggtacggcccccgccgcgcagaaccgcctcccgcgcctccgtccgcaacccgcgcccccgcctcgagcgcatacagacacccaggctggcgcgcgccccgcaacagaaggggtggcggaggatagggcagggaggggggttctggggcgatagacgcgcgctccagctctgcaagcgtggcctccctgtgggaggggagggcagggaacaaggctcgcgcggcgcccaccagcatgcgggcctactaggtcgcggcgcccaggccccgggccctgcccattcgtggagacttctatttctcattcgaggcggggtatgggggggccctcgacctcgggtccttcatacgcccacccaggcccctcccgacacctcggccacctcagcgctgagttctccgcgcaagcgccgactggggagccgcagtggggaagaggaaaacctgagggaaaggcctaggcgcgacggcaacccccaccctggcgcaggcgcacaacgaccctccccgggtgggagccagcgagcgcgggggcgggcgtgatcccgcggctcgcgacggcgaaggagggggcggtggggtgcgactgcgcacgcgcgctgccagcccacgtgacgcacctcgcttcaacgccgccacccgctccctcccgccgtcggctgacgtggagggccggaggtggcggcggcggcggcggcggctgctgctgctgctgcccgcgtccgaggctcgcgggcggcgggcccgggtgagtgcacacccggcgcgctgccgggctcccggatgtgtcaccttgtcccgctgcagccgagatgccgggggagcggggccttccacaccccctccgtgggtgtgtggtgagtgtgggtgtgtgcgcgtctcctcgcgtccctcgctgaggtgcctactgtgtctgcatgggttgggtcccgcgcgatgagggggtgtggccgccattgcctaccccagtgggtttgcccccttggtctggtgccccttcgcgagcgaggccctgggatgccggtgcgagggtgtgagtagtccctttgtgcgcaaccccccgctgcccgtgcctcggccggtgcgtggctgacacctccgctgggtggaggcgctcgcgtgtcgcctcgtcgccccttttgtgtcggtgtccgcgctccctggcggctgcgtgggcgctctcggccttgcaggtggcccccctttgtgttactgcccctgtctgtgggctgcgcgtcccctagcgcgcgtggccgcgccttctgcaattgcgacccccgcctagagccttgctcgcgcaagtgtgcgtccttgcgtgtctccgagtgacgcagagtgtctgcgcatgggtcctgttgagtgcgtgatctcttgtgtgcggatttaattctgtcgagtgggtatctcttgtgtgcaggtttcgttggtgagcgtgaacgttcgtgcacaccccttgctgtgtgtgcgtgtcacgactctgttgccacctgttttcgtgtgaactggcagtccagtccagggcctgtccccacggaacggacccaggaggggggtaacctcgccgctcccctcgcccccgcgcctctttctgagcattctctcccacagacgctaatgggaaggggggtggacaggatcgagtctggccagctgctccgcagtgttgacgctgccagtgtggcctcttcagccagcctgttcaggagacagaatagggggatcaaagataaaaaatgaagccgagacgtaggtgaatttgggctggtaccagtgcgccgtgccttttccagtggcgccctggacgccaaaaccccctcagttgcagagacctttcaaaatatatgcactctcctactgggcgatgcggtccttaggcgttcttgatgatatttaatggtttatagagtattttatggcattcacctaaatctctttccattttgcccaagatcctggcgagggaaacaaggtagaaattttacagattttactcctccggagagagccttttccttataactacgactctagttaggacattttttgttgcaagaaatttgcgatttatcctaaggaaaatgggatatagtataaggatacctagggtaagaaacttcaaaccccttagagacccagctactgctccgattgctcaaggtttcgtgctctgcgctcaagggctgcgttttggtgtctttgttctgcccaattttcttattgtctaattttcctttttttcttttaatttttggaatatttcagatatcaaatacagagggggagctaaccaatccatgattcagattttacagacgtgattatttaatcttttgccaaatttacttcagatactctttttttttaaagaaataaaattgctctcagttccttcccctccttttctagagatagccactgcgttgaggtttgtgtatatctttactttgcatattttatactttgatcaaggtgaatccatacacaatatatattattgtttgtttttaaactttaatggcattaaaatatacatgcctttttgcaacttgctttttttttttttgctcagcatcatattttgaggtttatatatgaacaaattgaatgattgtgttatctttggttcattcattttaattgctggtatagaattgcgttgtatgaatataccatatttatttatacattcccctgttgatagactttgaacttgtttcagtttttgactcttaaaaacagtcctgcaataaatatctttgtacttgtctgcttgtgcacacatttggaagtttctgtaggaagtacacctaagtagtagatttgccggattgtaggctatgtgcgtcttcaatttaaccaagtatcacagaagctctcgaagtggttgtaccaattttcactgtcactggtgttgagtgagaacacaatttcctcacaaccctgctaacactttatgttatgagactttacatttttgccatctctttactgaccagcttccttatgacttttggttgctgctaaatttgcttgtagccaccttggcttctcttgtagccctgtgtcagcctatggatttatctcttatagctaattggcttagtctttatctcctttggttctcataagattaattccaatgaacatttgttgtatacctaatgtatgtcagatcctatgattgatgtatagatagaatttccatgatatgttaaatatgtacctctttagtggcaggtgaggtgatttaattaaaagtattttttttcttatgatgaatgtttaaaaaatttttcttttcctctccattttattgtagtatttgataaattcaaaatatatgtaaaacatatgcaagctgtatagcagaacaataaaatgaacacctatgaattcaccactcaatccaataatcaaaatgaccagtattgaatgtgcttacttccagaggtgactaccatcctgaattgtgtatattatgccttgtttttaaaaataattttatcagatatgtatacatccctcaaaaatgtattgtatggtttctgttgtttttgagtggaaaaaatcatattgggtatagtttcctgggacttgcttatttcacttgatgttatgtttctgagttactaatattgggtatagatgtaagtcattaattttcactgctgtgtaatattccaagtgtgaatataacacagtgtatgcattcttctgttaatgggcattttggttgtttctaggttttgctgttatgaagttatatactttttggttcacagttgtaagaatttttctaattttcacactggggtatatgagccccagaggagtaatgaagatttgctaaggaatgtgtgggtacaaatgatgttaatgaatcagtttctagatcattacattccataggtactctttcctaaaaatggtaatgcctgaggcctcctgctagtgctactttcttaccttgtgtttctaacattgcactttacataagacaggcaaaccacaggttcttgtggaatcttactatggcattgcccaaagggggaaaactcccttggggaaaacaaagggattttttttttttttttttttttttttgagtgaagttttgctctttttgcccaggctggagtgcaatggcacgatctcggctcactgcaacctctgcctcccaagttcaagtgattctcttgcctcagcctctgagtagctgggattacaggcgcgcaccaccacacccggctaattttgtatttttagtagagacgggatttcaccatgttggctaggcacgtcttgaactcctgacctcaggtgatctgcccgactcggcctcccaaagtgctgggattacaggccaccgcgcctggcctacaaagggataatttaaaataccactatagtgttagggaaagcctcttttaatcctggcacttccccatccatttccttaagagagatatttccaataaagttgcttttttttttatgttatcagggtatattttttggccaaccatatgctggtaataattatacatttaaaagaatgagataatcagttttactttaaaatgttactgtgatgttctagaaattcaccctttgcaattatttaatcttatggtgatattttttaaatgtcatcttaatgggtaaagggtatgcaattttaaaaagcacttttggtggtttgcgagcaaaaaaaaaaggttgaaataccaccatgttaatttgttcagcagcaaaagaaaaagaaaagagaaagaaatactgccgtatcactatagtaagctgtttgctagaaatgggattgctagatcaaggggtatgaatgatcagctttacaaaataatgtcagattactttctgaaggggttgtatcagtttgtactttggccagcagttttgtctgtttatatactttgatcaacagtgtgtaagagttacagttgatctacaacctctccaacacttgttattgtcagacttaatatttgccaatggaatgggtatgaaatgatgcatcattgtggttttaatttgcattttttgttattaatgagattgagcatcttttgtatgtttatgaactgtctttgtttcctttttatgaaatatctagtcatatattttaccctttgttctgatgagttgtcttttaaaactggtaacatcgattatgtgcgttgtaaatatctttttctggtttgtggcctgtctttctactgtttatggtgtattttggtgaacagaagttcttaattttaacataatctgattggaacctttcttgccctgggcttataaagacattcctctgtttctttttagaggttttaaaatgatgtcttccacatttaagttcataatttatctggaattgatttttgtgtatgttctgagatagtgatccacattgattttttttttctcctgtgtggttctaattatccctgtaccatgtattgaattggccctctgttcaccagtggtctgctgtgccatctcttttacatgtttagttactacctgcatgggtctgtttttggcttgcctttctgtgtcacttgtcaccttgtctgtctctgtgttcataccacactgtcttaatcattaatactatagttttacctgaaatctcggtatctggggaggacttgaatctcacctatttttggtcatttgttcttaagaattagcttgttacatgacatgaaaaaccctgtaggtattaattagaattaattgaatcagtttgggggagaatcgaaatctttaagattttgatcctttttatttttaagaatatggtatgtatctctatttatgtaaagttttagtgtagttttgtaatattctccatagaggtcttccactttttcatatgttaattctgatgttattgtttttgttgctattataaatggtggtgttcttaaagattctatcttaacttatttattgttagtaaatattttaacttattgttaaatagaaatttaatgaatttttaaaaatattgaccctttagtcatccacttgataaacttactacttctaatattttttctgaaattcctttgtgttttctgtgtggataattatatcatttgcaaatagtgacagttttagttcttctagttatttttgcttttaatttattcatttttttggtcttaaatgtgctggcatactttatacttacgttcaatggaagtgattagggttgttcattagaagcgattatagtgggcatagagttcttgttctcaattttaaagagaatatttctcagctgagaataacatttgctgtgaatttttgtagatacctttgattaagttagggaagtcttttcagttgtcacatgcttttctgcatttgttgagaatatcttgtgtcttttcttctttaatctgttaaatgtaatgaattccgttttatagatttaaaactgttcattttcttttatattctttcttgagataaacccaaattggtctttatagattatatttttatgaactactagattgagtttgctcatattttatttagatttttgtgtctgtttatggctagaatcacttctcatttttctttattggctgtcttatctgacttgggtattaaagttacactgactttataccatgagttagagaatagttcctctttttctgttccctgggagagtttggattggagtgatttgtttcttaaaagcttggtggaacttaactataaggtcatttggatctaatgttttcttcttggaggtttagtagtaattagcagttgaacagtcataggactgttcaggtattctatttcttttagtcagttttggtaagttttagaaatttgtcctttcatcaagtttatggtatggttttttttttttttttttttttttttttttttttaagatagagtctccctctgttgcccaggctggagtagtgcagtggtgccatctcattgcaacctctgcctcctgagttcaagcgattctcctgcctcagcctcctgagtagctgggattacagccgtgcgccaccatgcttggctgatttttttgtatttttagtagagacggagtttcaccatgttggccaggctcttcacaaactcctgacctcaagtggtctgcccacctcggcctcccaaagtgctaggattacaggtgtgagccaccgctcgtggtatggcattaattctctttttaatctctgttttatttgtatatgtgttccccttttctcatgttgaatattatttatgtctgacttctctttcttgatcagtcttagtaaaagtttgtccatttttaaaatcttggcaaaggattaacttttggcctaatttgttctattatttgttttttatttcattgatcttttttctcttttattatttcattttactttcagtttattattttactatttttttcacttaaattacacacttaatattaattttcaaccattccgatttcctagtataagcatgcaagactgtaaacttcctcaaagttcatttttgcttatctaacatagtttaatttatagtgttttcattaactttcaaatctaagtatttttacaatttctattttgattttttctttgacttatgagttacttagacatttttaaattttcaaatgtgtctatattgttttcctttaattatcgatttcttacttgtgttgccagagaatattttatctttttagcatttttttttttttgcccttgctttatggccttgtacatagtgaattattagaactgttctgtgtacacttgtgaagagtatatattctgtaattgttaagtgtctattaggtaaagcttgttatttgtgttgttctgatagtctttatccttattaattttggtttatcctatcattaactgagagaagtgtgttgcaatattccaccattactagtttctaacagatttcctgtagttctaacaatttttgttcttctgtattttgagacttttattagctacatgcaagcttaacatttttttcctagtggctcgaacctttactatattgtgatcttctctaagtttgcttctttgtcttagaggctttttgtctgatcccgtctttcttttggtgctaatttacctggaatattcttttctttcattttactttgattttttttagtgtccttacattttaagtgtctcttataagggacatactactggatttttcttttaatctcaccagacaacttctgtcttttaattggttatgttccaggtgtcttggttggtgtttgactcagttttagatattaaaaaaaatctaaaagtatttttattttacctttgttcttgacagatcattttgatggatgtacaattgtaggttggtgtttcttttctgtcagtagggtaggaatactattctgctgttgcttatacaaagtgtgctgccagttttatttatgcctttttttttttttttttttttttttttgaggtggagtcttgctgtgttgttaggctggagtgcagtggcgccatcttggctcattgcaacctccgcctcctggattcaagcgattctcctgcctcagactcccaagtagctgggactacaggcacctgccaccatgcctggccaatttttgtatttttagtagagatggggtttcaccatgttggccaggatggtcttgatctcttgacctcgtgatctgtccgcctcagcctcccaaagtgctgggattacaggcgtgagccactgcacccagcctatttatgcgttttttgaagaaaatatcatttttcttttagttacattggattttctgtcttttgtgttacatcatttcacttctaagtctagatagagattatatttatcctattttggatgcatgtgtttcatgattctgcattttgtctttcatgagatctagaagtttctgagccctgtattctttaaatattatgtctcattagtctcttctctcctgctggaactttaactggatatatatatacactaaactgtttccagatcacttattctttatctttcatattttttatctctttgtttctctttaccagaatttacagtgctggataatttcataaggcatatattttagttcaccaattttctcttcaactgtgcctaatatcctctgtaacccatcctgtctcttttttttcttttaacaattgcatttttaattactttttttttttttttttaagatggagtctctctctgtcgcccaggctggagtgcagaggcgcgatctcagctcactgcaagctccgcctcccgggttcacgccattctcctgcctcagcctcccgagtagctgggactacaggcgcccgccaccacgcccggctaatttttttgtatttttagtagagacggggtttcaccgtgttacccaggatggtctcgatctcctgacctcgtcatctgctcacgttggcctcccagagtgctgggattacaggcatgagccaccatgcccggccgcatttttaatttctaaaagttctgcctggttcttttttgatatgtccagtcattcttcatgttctcatgttatatgctgatttttgtgactctatagctattctgtagactatatcagacattcccaatgtctgatatccttgaggagggggatgtctaaatttattgcttttttgtttttttttctgttgtctctcctcaatgtagctgtcacctcatgtgtttggtgatcattgattatgaacttctgtttgatctttgtggtgatcttgagagtctaatttgaggatgcttgctttctgaaagcatttctatcagctttgtctgggagccagaaagtttagctggcatcacttttgagttcctacattttgcttctggcccagggctcagtgtcctgatcctattactgctcttggcaccactacttgtagcactaaactgtagccaggtttaatttctagctcaaggtttgttgcttttgcgtggagagggtgccttcacatgttcccctatttctatgagctcagcaaaaacatccaaaaagtgtttttttttttaatctaggatatacctttttcctcccaacagtacattcccccagagtgtatagttgaccataactgatgggatcagaagctctttattttaatatttaattttagtagtatatttttgtttgattgtattataaaaaattttatggtaccaagcaagctttcttggtgataccaacatttccattaaaactagtttacatctaagttaagatttgagttatcctaaagaaaagtattaagtaaatagcagtacagatggcaaatggattgcacaatatatcctctggatccatagtgaccctgcagagataaacctgtgatggtcaaacaatgtgaaaactgctgtcagagacatgggcagggtgctcttgtttacagagaagaggtgcaaaaatcaacttgatggtagtgggaagatcaggaaatgcttcctgaaattgagtattaagaactaatagacattaggtggttgcagaataagttttgtttaggaaggacaagcagttgggtatgactggcttctaggttgtgtgttgtggagtgactggggataaaagcaggagcaagatcacaaaaggtcttctatgcttatattagggaagttggactttattctcaagctgaagggaagctgttgcatggttttaagcagtaaagtgatatgatcagagttttagaggatgccaagattgaaggcaagtctgaccagttaggagactgcttgttaaattagttcagaggagaaacagtgaaggcagtggcactgggcatgaagaagtatatgtgtgctaattttagatttcttagggaagcagaaatgacaagagttagtggtccattggacagaaatattgaaggagactggggagtctaggttgactcccagggtttaggtttgggcagtaaaatgacatgtagaacaattaactgataaacagcatacagaaagaggaaagaacttcatttcatatgtttgtttttgaggaaaagatgtttgtttttgaacttcctgattcagaggggcttgtgggacatcttggttaagatcctgtagtagttctagtagggtctagaagtcaagagatacaaccccgcctggaaggatttgggagtcttcagcatttggaattttggaagccattgtttactgcagtgcatatgagataatttaaactggtacatagataaacacttgaaaaaattttaatagataggaatttaatgtgtatgagaaacataacttgcacatctaacctttgataatcatggacattatcacttaggccaagtgagctcaataaaagggaaatattaactaaaaatatatgtgatacatggaaatggcaaaaatcacggtgaagctatgcaaacgatgcaagttcagaaagtgctgtgttaagtcatgggtgtggtggataaattcacccaaggagagagtaagagtgagaagaaaagagagttgacattgggtggcggggaatggagaagaagaacccatgaaggaaactgaggaagagcagccagacgaataggaggaaaaccaggagaagatggtctttggagtccaaatgaagagttctgaggaggaagtggtccacagcgtcaagtaagttgtaagctgaaaagtgctctttggatttagcaattaaggtagactatttagctggaagcatccaaacagtggattttaaaaatactcatctaacattaatgttaatgatagctggtatttatagcatttcccatatacctggtactcttctaagctctttacatgtattaacagattgatcaggtaggtagtatcgttatccccatttgatatgcgaggaaacacagaggaagcacagagaggttaagtaacttgcccaagatcacacacccaaggaaacaagagagccaggactcaagcccagagtcttggctgcagagtccctgttcttaaccactttgtcacattgcctctctagttaaaaacaaaatacaaggccgggtgcggtggctcacgcctgtaatcccagcactttgggaggccgaggcgggcggatcacaaggtcaggagttcaagaccagcctggccaatatggtgaaatcctgtctctactaaaaatacaaaaattagctgggcgtggtggtgggcacctgtagtcccagctacttgggaggctgaggcaggagaatcgcttgaacccgggaagtggaggttgcagtgagccgagatcgtgccagtgcactccagcctgggcgacagagtgagactgtgtctcaaacaaacaaacaaacaaaccaaaacaaaatagaaaataaaatataccccagtgtcgtaattacagtacaattggtgctgtgtgtgttatcagtgagattcgctaggcttgaatgaccagtatcagtctgccaggtatgagcacattaattgtattgtaattgatgccatgatgtgtgggctgtgacagttcttggctctttctgtattttatgccaaaaaaatttgtaagacaagtgagattagcatatacctcatattatgtgctatagtttgggtgctccagtatcttatgttttctggtcattgttcacttttagagttaaattttttaaactctagaaatattcatgcagaataggtcaggttctagacattatagataaccagtcttttgtggaaggtcattaatgatcctaatgaaagcagtttcccttgaatggtcgaagtggaaaccaaattgttaggaaactgacagtgaatgagaatggaggattcagatgggtgaaaaatgaagagttcttgatgaagttgaagaatggctgtggtaggaaatcaggaagacatgagccgtaatgactcttggctatggtcagagaggagctaataaagatttaagaactggtttcgacccaggtagtgatctgaggtgtccccctggggtgggagagcctagtgaggtaggcagtgaagatcatgttagttgaggaggttgttaaactacaaggctagggtattgtgtgcatggacctcgatgtggctgggatgatgatagaatttggaggaaagagaaaaacactgaactagttgccagtgatcttgaaacgtgacagtaaccaagagataaataggtgacaatgacaggaaaattagatgtagtaaaagagagtgtttgagagcagaagctatggcaactaaagactggatttgaatccttcctagcttggtgacatgagcaaattacttgatttaagtgagcattttcccatctgtacagtggagataacgataattgtgcctgctaagaagaattgctgtgaagattagtgaaataatgcatgtaaaacatttggtacagtatgtgacacatagtacaaatagtttgctaggaagattgttattattcttcacttgtgatattgtgaagttttcatacagcaaattggacatcatgagatggattgattaaataaatagatttgaacttcaaggactggtagtgttcttgctttggaaagaagaaacttggtttatcctaataatagtaggataataatggtgaagtgataggtacaagtaatagtgtttatgatgcgctggtgatgataggaaaagaaagccattatatgggcaagagctagaagtaataaaatggtgcatttttcagtgatgtttggcctatgtagctattctctgataactataaaaatccttattattgaagattcttcaggaaaaaaaacccttagtctgaaactttaccaccaatcccccttgccccccattgaaatacgtatttttaaaacatggcttttgataatgtgagggttttttcctttttgcgatttagcagtgctgattgtgtattgcagtagttgtgagagcattagaagcagcagtcgataggaggatggaaggtctggatgccgccttggggagttaggagattggcagacttaccctgtaccactctagccctactcctttgcccaagacagaaacacactgagatggataggagaatatgagcagttgataggaaagttctcagtggagtcaggatttaggttaggccaggagattgagaatataacagtttgtgtatgatgaaatggcatatttcacagaatgcagtaaaagcaggtagggtacaagtgcagcaacaggaagatgtcttttcttcattcagcaaacacttatttgagagcttaccatgtgctaggcacatacaaagataaataagatgcccttgatgatcctctatttaaaggagacatgtaaacaggttaacttagagtagagatggtgaatatgtgaacctgaggaaaggaagaaatagattaaattatctggagagagaggaaaagtcagcagaatggggacgagaatctttcggagctcagtgttctgataggagttatttccttgggcataggttccaagtatttttctaatataccatagaagccaggaaaactttcttctgttatctcaaatgatttaattactgacttgagtttgtgttgtctccttagacttgtgcaccatggacaattttgctgagggagatttcactgtggcggattatgccttgttagaagattgccctcacgtggatgattgtgtctttgctgctgaatttatgagcaatgattatgttcgtgtgactcagctttactgtgatggggtggtaagtaggtttgctaatttttcatttttgacattgtgtattgaaggttttctggtttagggctatctgagtaaagatgtttttgtggtacgtgcgttttgacagggaggtacacatgctgttgaaaagttgatttgagaagggaaagtaagcactggctcaaaaataagattgtggagtgccagagaatgagtggtggcaaaaggtggttttctgacagggcataagaaaagctcttggggagagccatagaagcaaactcaggtaatactgtaaaacgggtctcaaattaagactctttggctgaagatgtgtttgaagcatataaataaatgcccactgaaagttctttggttagttctgataatccttagattaaaaatcaagaacattttactagacacaaatcaaaataattttcttctttttagggtgtgcaatataaagattatatccaaagtgagaggaatttgggtgagtacgttggtatttttaatgttaatttatggaaagactacaaagggaggtccatccatcctgtcatagcaatacaacagatttatatgccttttaaaaatgtattcttactagtttttcactagaaatcagaacttttctttgttaaaatagagtttttgccagcacttaaatattcttaacatttaacaggctagaatacttcattcattcatttcttccctctccatatccatttttgcctttttactattaagtgttgattcattaaaaaaatgaggcacaaacattaattttaaactttttttttaattaagaatttgacatctgcagtatatggtgtagtaaaccaatttctgtcctgcaagattattgcgatgccattaaaataaacatcttctggccacttctgtttcaacatcaaaacagttccgtaatatcacgattgcatccctgtgtggacgccaagtaagttactatatgttgctcattttgtgtggacagtgataaacatgttacccaataccaagaaatgcaagttcaatggaaggcttatgtcttattcttgtatgctgctcaacgtttgtgtaatagggtggaaaaaacaaatacttgagatttggatatgaatgaataattgtaacataatcagtgaaattctgaatagtactagatggtagactggaagctgagtcaggaggaattaacatgggtgtttataagtatcagtgttatagtgcagaagagaggaaaaagatacagtattttgttcatttaataaatagcttagttattgttacctagagtgaagaaaaagagaacttattttttaatggtttgagatatatagctaagcataaagttcaatgaatttgtatatatgagaatctaatcttttaaaaaataaatttgtctttaagcaattcacgtgcttctgagataaatttgaagaaactacaacatcttgagttgatggaagatattgtggatttggcaaagaaagttgctgtaagtggtagaatgtaggttcccccgagcccttggtttaaataatataagcatttatatggtgttaggctcaaatgactaatttatagcaattaacaggtaatggttttagttttggttaacctgagataaatctgctgtccatcagtgcgtgctcagtatttgagagatcagggagatggctgatgtcatggttctacgctggggaccaggactgcatcttgtcattaaaggatagaaattggaacttgtcacagaaagtggggtatgggttcatgaaaacctttgccacaggttctgaaagtgatgtgctctatctgttgatataaaatcacatcaccatcaacaaatattttgtctttgggtaggtagactttatcagggcagatttgaggaggtgtccttcattatgctattgagataagttgagagtttttgtggtttttaatttttttttgaaagctattggatagctttttaaatttcagttggttatggagtcaagtgttgttcttggtactattaaatttagaaagggcattctgatgtttattttctgcagtagttatttgcagtaacatacaaaccagtgtacctttataaaaaaaattaagtgcaatgaactttattattattattatttttgagatggagtcaccctctgtcgcccatgctggagtgcagtgacgagatcttggctcactgccatcttcgcctcccggattcaagcgattctcctgcctcagcctcccgagtagctgggactgtaggcgcctgccaccatgcccagttaacttttgtatttttagtagaaacggggtttcaccatgttggccaggctggtctcgaactcctgacctcagatgatccacccgcctcggcctctcaaagtgctgggattaccagtgtgagcctgtagaaacctcacctctactaaaaatacaaaaattagccgggtggtagtggcacgtgcctgtaatcccaggtagttgggaggctgaggcaggagaattgcttgagcctgggacgtggaggttgtggtgagctgagactgcgccactgcactccagcctgggtgacagagtgagaccctgtctcaaaaaaaaaaaaaattcacatgtctaaagattatactaagttattttactgctagaaccctattggagactattttggaattcttgtcttaagatcttaaggggtaacttggtcatgtaaatgcttgtcggaagtgtactactgagtacatatagtagtgttcctaaaatgtaggccatttttccgttagaaaattcaagtagaattgactgaataaggaaaaaatatgtcctttttttatttttcagaatgattcattccttattggaggcttattgagaattggttgtaaaatagaaaatgtaagtgttaaacactgaaactggcacagccactgtggatgagtggcagtcatctcactgctcatttccccttgcattgggtccatacactcaatgttctatatgtggtatttggtagtattgacttctatattttccttaaggagactcctcattttgggggtttggatcattttctctcttttttttttttttacccatgtacatagtgtaattttgagcctattttacaagttgattctttttctcttttagattatttacctggcttatgtttccccaaatgaaattattaggcctctggtatgaatattttttgttatataattactaggtaatctccagattcaatgttaaaccaatttttaatgatactgatgccataaacatctatgtttaccttaagcccattgttaactttaatttttgaagttactttagacattagaagtacaaataacatttctgtgaattcttgatccttcatggagatcactgcactgagtgcccatttgcccagccacatcttcctcttgttctttatctccttattcttctgtttgccacagaccacgtaaaatatgtagttcctttggagaactttaatctataaatttaaccttggggtaaggatggaagtctttgtgtagatgagatctgagaaccctcatccaccttgttatattgcacttgcctgctaccccaggcagtctggccaggttgtagacctcaaattgcaggtctgtagtaattgcagaagcatcttgagctctgagggtggcctgaagtcacctgaagaggtaacatatatgagtccatagtatctgttaatttatatgtcagagtctgtctactctaagttacatgccagagtagcaaaaaataagtggttgtaccagttttgtagtaaggatctgaaatacttgcataagatgaatttataatgccacatgcaaatttagaattaataaccaaagccccattcttcatttctcttttgaaacagaaaatcttggcaatggaagaagctctgaattggataaaatatgcaggcgatgtaacaattctaactaaattaggatcaattgacaattgttggcctatgttaagtattttctttactgaatgtaagtataaatgctttaaattgttacttgactcagtttttaaaggtgtttgggaaaatgagatatgtagttaagtgatttctgatttatcttagaatttaaaaaaagtttttattttgttatatatggctgaaaaagagaatttcttttttttattatttatttatttatttatttatttattttgaggcagattcttgctctgttgcccaggctggagtgcagtggtgcagtctctgctcactgcaagctccgcctcccgggttcacaccattctcctgcctcagcctcccgagtagttgagactatgggcgcctgctaccacgcctggctaatttattgtatttttagtagagacagggtttcaccgtgttcaccaggttgatctcgatctcctgacctcgtggtctgcctgccttggcctcccaaagtgctgggattacaggcgtgggccaccgtgcctggccgaaaaagagaatttcaaactggtagttttattctatattttctgtcttaattatttttatgacattgtactttaaaaattttcactgaatggatattgtaagttgttatatgtaatactcaaagagaccacaactgggtagtctcctttgtaagaaaaagtcactgaagctaagcttatgatttttattttcttcatgaatctgttgttcttttatgtatgaggtaactgccttacatatttcttttactttgtgaaatatttttctttaaagcatttgaatattagcagtgtttttatagtatagttataggaatcttgaaacaggaaaggtttggcttttcagtagatgatgaccaataatttaccatctctgctgagataaaggcaaattttgcactattgacttaagtgctagaaaggaattaaatgaagacacatctttctcataggtttattagacactggggtgtattacactgatagaggttgttctcttcattgttttggaggcccttaattataagctagattttatggtggaagtagagaagcagtatcttgtactaggtacacctctttaggcttatagctgattttttacattctattttctttataatagctctgcaaggtggctgttactatctttgttttagcagtgagcacactgactttgagaggttaagtgttgtttctgcagtatagtaagtagtaggtagtagtaggtaagactagataagtcagatctctctgatctcaaagcccaggttttattccatgtaatcttactctgtcccttagaatttctttatttggtgactttcttaggtcctttattgaatcttaaattttaggtgctcttttcactttagaaatgaatatgtttggctagaggcttaactatagttttgttgcaataaatttttttttgccactttaaaatatcctttttatataatagcttacaatgtagaaaatgaggcccgataaactttagttacttactgcatcttaattagtttattaaatttttataataatagtgtttcaaataacttctcattgtaacattttactcatgagagtcaaaatactaaataaaaacttttgaaagtatttatttaaaatatgttgagcatcaaaaatccaaaatctgaaataccccaaaatttgaaaccttttgagcttcgctatgacattcaaaggaaatgctcgctgggcgcggtggctcacacctgtaatctcaacactttgggaggccgaggcgggtggatcacgaggtcaggagatcgagaccatcctggctaacatggtgaaaccccgtctctactaaaattacaaaaaaaattagccaggtgtggtggcacatgcctgtaatcccagctactcgggaggctgaggcaggagaatcgcttgaacccgggaggcggagtttgcggtgagccaagatcatgccattgcactccagtctgggcaacaagagtgaaactccatctcaaaaaaaaaaaaaaaaaaaaaaaggaaatgctcattggagcattttgaatttttggatttgggatactcacccagtataatgcaaatattccaaaatccaaaattatccaaaatccaaaacacttctgatcccaagcattttgaataagagatactcaatctttatattaaatagattgtagaaagtagttttgcaggtttttgttttcatgcatttttattgaatattgtgcatggtacaccatacatgcttgacagtgtttattgaattgacttaagtaattatgtggcctatttggaatatgttatgacagagcatttattgtaaatacaattacaactaatataataataaataaaggttttttattgctagaaataaaaggtgagattagattcatagcaagcaataactgatgttttctgcaacattttatcagtttatttttttactgagttatttaatagacataaaaggttacaagaaacatgtgctatttagaaagaataataatataggaccgttgtggactcacctaactcaagaattagaatattatcaataccaatttgtttttttttaaacaaatgttctctcttgctctctcctaaaaataaaatttagacaagtaccacataactaaaattgtaatggaagactgcaatttgcttgaagaacttaaaactcaaagttgtatggattgtatagaggtgagaatgaatattataaatatattttaagatttgcccattagaactttttaacactcagaggaagttaataaaactgctgacaatatacaattcataaaattggatgacatatttgagggaaagaactaatatcttgatcagagttctctaatgatttaaaaaccattaattgaaagtgaaaatttggtttttaaaaactttagtctttaatgagttgaagaaatatgattttctttggtaacagctgagatgtaattcatgtgctacactgttcattcataggaaataggactttaactcaattttataaaaggaatttgggaaaatatttaatgttgtattgaattccctaatgctgttgatatgatgtgatttagtttatttttaaaaaattgagtgttcgaaatgaaaagttttagttttttctctagcacctttcatatatattctcgttaacctaccaactcatgctttgcaattaatctaatcagcattgcctctatgttattgatttatatatgtttttcggcactaaggctttttgaataacatcacatttgctaacctaaagttaaaattctactttgcatctattttttagccttatagataaggtatatttaaaagtgggtctgccaaataccgcacaaaattttagcaattattcataaggtgatggttttgtttactttttaatattctctaacaaagttagtgttgagtcattcaagacaggtttatttaaatatatataccgaggctgcacatgatggctcacacctgtagtcccagtactttgggaggtcgaggtgggaggattgcttgaggtcagaagttcaagaccagctggggtaacatagcaagacctggtctctacaaaaaatttttaaaaattagcttggcatggtggggtgcacttgtagtcctagctacttgggagactgagatgagaggatcccttgggcctgggagatggaggctgcagtgagctgtgattgcaccactgccctccaacctgggtgacagaccctgtctctaaaaatatgtgtgtgtgtgtgtgtgtgtgtgtgtatagtgggtgtgtatatatatatgtaacaaaatattgggtattgtaatctcattttctacataaataatcccctatgttatttctgatatcgaagatagaaatccagatccatttttactaggtattgggttcttgatgatttttggaggtcattgatgggtcttctttcaccttggtttctcaggaaggagaactaatgaaaatgaaaggaaatgaagagttttccaaagaaagatttgatatagctattatctattacaccagagccattgaatataggtaagagcaaatagaacaaaagagatgctttttctatggcacatcaagttagaatggtagtcagaagaaataaaaacaagacggagaattggagagtatcttccaacttgtgcagaatagattttctcatccttgggtgttggaagcattggagatggcctgggtatatgaagctaacgtagtagcataactcaagcaagtcaggcaaaatggtgaattttctgttccattttctttaaaactttccagtacagagttacctcttttgtcttgttctcattttgctatcaaccaagtcctcccaagttattaactggtcaaaaaggattaaaggattagttcttaatagttaagatgccacccattcagggttttttgctttctaagagggaacttttacaggataattgagagaatgcatacatgctctctaccttgtcttctctttgctcagctgctagaattttgtagctttcctccagatgtgcctcataactgtgcgcctattgtctcagtcaggccgcctaatattgtagcagcctttgaagggtgctctgtagccactgctctttttcctcccttgtgcatctccacagggaatgagggaatccggttagtgtaccacctctgagaggctgctgccctattcttttgaggaagaagtggaggaaagggagatacgtttcaccacacagtcagataaaactaaaaaacaaaagttcaaatgaagctattttaatttgcaattactgtaggcttcctttctcagttctttgtcaaaacgacatagtcctgacttattatataagtaatcctatcctctagagttactctgtagtttgctagctctttaatatgtctcgtttgatcccccaacagccctatgagttagagcaactagagttatcttcattttgaatatagggaagtttaggttggttcaaacaaagttacttatgtaagaagtgaaggaacggggacttcgccagttaagactccaggtcctatattctttttgctttgccacacatatgtaaagtttaaaaaaagttttctcatgccttatgttttctacgtgatttttatttgtttcatgtgtaatgtgctttactgactaaacattgtatctttttaagacctgaaaactaccttctttatggtaaccgagctctttgttttcttcgtactggacagtttaggtaagttggttaaaatatctcaaccactgaattattatgctaaatacccatttttgggaaacgtttctgtttttcaggtatacaagaaaatccttgactggttctttggcagaaatacttaagtggttaaaagagtatgcttaggctttatatataataacaacagtgacagcagcagctattctgattgagtgcagacatatgttaagcattattttaagtgctttgcatatgttatttggttctcacagcacccgtaataggtaggtaatgttatagtccacattttacatgaccaaagtgtaccactagtaaatagtgataccaagatttgaacacagattttatctgatgatgtcaaagtctgtgtttgtggcacctatattacctctttatgctctgttaattaatccatatagtataaaagaagcattttcatcttttctctgtttatcctggtataaaaaattaagtaaatatccttcataagtgaaagaaagcaaataaatttaatattatgagagtggagtcataattaattccagttccttatattgaatttgagctgagtttttatttattagctaagaaagattgagaaagatactgcaccatgattttattgttccccagtataaaatttttagaacataaattatatatattgagcattaatattgagcaggtagactattatatttaattttgtcctgccttactgtaagaaaggtgtagggtgaattcaagaatacatccacacagtagaagaatattcaaaataaaacaaaccagaaaacgaagttggaatctgggattctcagaaccaagctacataggcataaggtcctgcataggtattagttataattcatatttgcctctgaccttcagctacccaaaatgaaatgggaaaacttgacaagttacttaattctcattgtccataaagaaacaggacaccaattggtcaggtgaaacagttttcctagtatttagttttgaaagaagttgggctgtaatattaattgagtgatggagtagagaataatctcagcagtatcttatgcatagcaaaaaactccctgaaagcacagttttgggtttcacaaatactttttttgtgaagttttctcatgaaagctgagagtctgctatcagttgtttttcagtgaaagcgcttgtatgggagggtgggagtggggaaggtagtaaactctaagcatgtagctttaaaaataacatttattgtgtttttcttttattgtaaacagaacacattctcatggtagaaaatttggaaaatacaagagtttaaaaagaagaaaataaaaatcaccagtaatccaaccaccttggagaataccgctgtattaacgttatgcagcttttagatggcttaagccgtggataaaccgaggctatctagactagaggaatggatgggcttgacacagtcttccatcaataccactgtcctcaacgggttctgacaagaaatgagctgcacatgtctttaggttattgctactggctaggtccagaattgcatttattttgtgctgtttgaaggtgaatttgtatgctttcaagatcagatgaataggttggcaacttggctagcctcttgtgaaaattgaggtgcctgtctgaaatattgcctggcagaaggttttccactttccacttctgagagctgagaggcacaccagggtgtttctgctctctttcatgagtgttgaatgctagacacacaaggaagatccttctaataccttgctgcaacaggaggtgaatcagagtagaagtacagaagctaggtagtttggtgaggtaaaggccaagagcagcttgtggatctatccttgtacctccttgctgatggtctagcttgtggtttaataccatctacatttcactaaagccaggtcagcagcattgttcctttgtttcttattaggcaatcaccaatatatattggatgcctattttattcacgaagtgttttaccacactggttttgctggtgtttcctacctcctcacacattgtctatatgatttgctcagtaatgtagggataatgttttcagagtccatagtatatataactcctgatcaggtgactagatggtgtgacttaaggaaagaacacgttgccagtaattcagatgtgccattgacacaggaggacccatgcctgagaaagacttttatctgagttactgagattaagatgttttgaagctcccaagcagagggatgctggatctgctgtggaaatctggctgagcagctgcagggacagctgggggtaaagcatccaccctcccccagtttggcgaggatgcactcctcagctgttctggaaggccagacttcttatctgctgtcattgaagcaagaattgagatgtccaaagagaacagaaatgggacaatttaatactagaaaggaataaaagggttaaagtcttgaatgctaaaacttctgaaataattaatttatcctgaaagattagaaaatataagttgaaactttaaatgaaaaagagattcaatttaaaaaagaactttggcaagattgatatctaaaagggtaaaaataataatactgtatcttacaacatggttatcactgttctgagcatttaatgtgtattaactcgtaaaaccatcacaactacgtgaggtaggtgctactgcctttttacagatgatgaaacaggtatagggaggccaagcaaagtgtctgaggacactaggtggatgtgatggagccagaatttgaacccaggcagcctggatgtagagtctctactattaatcactatgggaaggtggtgatagaataaaagggaatgtgaaagtcgaaaaaattaaaaaataaatggtctaaatagtcaataaacgtttatgaggaaatgattatccttccaggacatgtagattaaaaactacgagtttctcatttatacccatcagatggacaaaagcttaaaaatctcataataccaagtgtttgagaggatgtggaacaaaggagactctcatattcagctggagaaagtgtaaattggtacaatcactttggagagcaatttgacaaggtgaagatgtgcatactctgcaacccacttctaggctcatatcctctgaactctcaaatgtgtacccaagaagatatgtacatgccttcatgatagcattgtttgtaagagtaaagaaatgaaaacgacctaaatggccatcaataggggaatggataaatatggtatattcatacaatggaattctatatggcagttaaaatgaacgcaatgttgagtgaaaaagcaagtcacagaatgatttgtacactgtgatgccatttattaatgtttaaaaacatgcaaaacaatatgcatatatacagactgtgtattaacaatgtttaaaaatgcatgggcatgttaaacacccggggagtggctggggagagaaggagggaaaagggattggagttgggaggggtggtacacggtgggtgtcaactgtaacaaactactacaaaaagagctgaagtatatggcaacatgttaatttcttgctaaggtggtatgccattggtacatgggtgttcattttgttaatgttctctgtacttttatgtatacttgaaatatttgataaaaagtaaaacaaaatgtaattaaaatgcacatgataaaaggaacagaaaaagaacagaaacagtgaccactaaacatcaaggataaaatagtgaacaatgatcttgaaaagagaaatataagtattgtaaggccagttgcagaagcgtgaagtgtgcatggggaagcctgaggtgaggtatatatggggaaacagatgcttccttctggtggcagtggcagtgatgattttaatgccaaaatagtcatacagtttgtaaatccaaccacttttgggtgaatataagttaggccaagagcctttcaaaacccccctgggcctgcgaatgttgcgcttggaaaacgcaggagatggggttggaatgaggcaggggttggggaactgcgctgcctcctgcgcccccactcctgccgcagcctctccccttcaaatcttcacattgaggattgtgtttatcccaggacacctggcttagaagatgagatgtccgttttattctgctccttctcaaagtgtacttttcaaatatgagttggtaactatagggcatttgagagtgatcattgtaattatagtaatcagaacttttcagtttagtcaagaatctggacaaaggaatcagtcatatctgtaccttctgcagttccaacagcttatgtaatgtacatgattaggctttgcccacttagtgttcagttcattcttgtgagactcgtggaaaattcagattcttcggtgggatgtgatgaactgtgtaagggcaaatgttaattggagaaagtgaatgcttagcttgaatcgtttttgaattgctttggaaactcatgtatttttaaacttggtgtttacttgaactgttggtattcatttaagtatttacccatcacatgataactgccttccatcagatcccaactgtgattggtagcagacagatagactttaactaactcttctcttgttgctttttttcccccctaaatttctggaagactagagatataaagcactgtatgtttctgtgagaatttcacaaattcttgtgtgtgtgtgtgtgtgtgtgtgtgtgtgtgtgttggtttggtgaattattcctcactctgccctctggtgtgtgctctttatttttacttagagccactgaatttgcttttgaagaaaacatttacttttttcagtcttctttggggtataccccctttttaaaaaaacagtaacaaatgcacatggtaagcaacagagtaggaaaaggtacactcgccagctctgacccatcctctgattcatctcttcagatccttgtgtattcccataatattttatgcctatacaagcatttatgttgaaccagatgaaattgccatttttgtaagtcagaatataggcagttttatttggtttaatgtaatgtatatgtctttttctttaaatgggtaggaacatactacatacactgttgtacatcttgcttttttttttacatttaagtcttggagcttgttttggatctgtatatagagacctaccttgttcttcatggctgcacagtgttttactgaatggattgcctatgtaatccattagtttgtattatattagtatatagtttatatatatatattagtttatattagtatatagattattttatttacaatgttaaattatagatatattagtatgtagatttccattttaaagattatatatacctatgcaatgattatctttttacttatgttttacactcaggttcaaatatatctgtaggacacatttctgataaatttattttactcatgatatatgaatgaaagaacatatcattttaattacagacactttttatttaaaatgtatgtttattcagtccgtggttattactcactgcatatttgtcagtgactgaccattatacctgaatcttgcttttgttccttagttggaagatctggaaacttggggaatagttgttatttctttattgatctggtcatatcctgaaaataattataattgaggaaaaaaggaatatcccttatatggcttgcaaaattcttgcatactttttatggtatggtttaagagagtcaataaatagcatctcctttcccttccaagtccagaatcagttaaaagatggatggaaaagacaggcaaatggtgatcaaatattgcctttattactgatgcaattggagaacaggccttaagtctgatagtcaaggggctggttactattaggttggtgcaaaagtaaatgtggtttttagaaataatggcaaaacccctaattacttttgcaccaacctaataattcacccacagtcagacagaactgggctcttgggaactttaagcctggaagaaaagggaatctggtgttttagattccaaagagtaaggccaggtgcagtggctcgtgcctgtaatcccagcacttggagaggctgaggcggatggatcacttgaggtcaggagtttgagaccatcctggtcaacatggtgaaaccctgtctgtactaaaaatacaaaaattaggtgggcatgttggtgcatgcctgtaattccagctactcaggaggctgaggcaagagaattgcttgaacacagaaggcaaaggtttcagtgagctgagattgcgccactgcactccagcctgggcgatagagtgagaccatgtctaaaaaaataaaaggattccaaagagtgagaaaaagaagaggtgaagccatgtatgattagtgtccctccctcaccattagataaattattattcatcatctggggatgttagccaagggtggggagaggaaagagttcaggaataattagcaaatccacatggaaactaggggagagggaataactgttctttacaagcatcatcttttagggcagaatgtagcatattttatatgcagtaatggggaggggctggagaaataaaaacacttccctatgtaagagcaataagttggagcacctggactagaactctctttcttactctgtttaatactcaccatgtcacacagtcttcaagagtaaataaccgtttgcatctggagtcttgtcccattttcatacatctcttgcacaggggattgctgctaccaaaagtcaaacctgattatttagaccctgggctgcagtggtctggatgagcaatagcatcatgtaattgactatgcccactttgccttagttgtaggatgtggtcatatgccagtaaatgtgaaattttattagtattaatattaattgcattcatatactaattgtgatatttataatatatgctattataacgctgtttgtagtgctatatattataagtaatgttcagcattgattcaacaaatattggggttctgttgatggataatgtcagaaatgagcaaaaacagcctctgtgtttcagacagtgggctggcattgtgagggccttgtagtgggaaggaatttgttgcatttgtggaactgatagttgctagatggcctgaatacagaggagagggtagtatgttcataggctaagccaaggagggccttgtaggctgtgttaaggcttttggcctttaagagcaataagaaagtaaaggattttaaactgaggagagagagcatgattagcacttaaaaaaaaaatttgagcatagtgaaaatggatctgaaggggatgtagtgtggatgtaggttaggaggctgttgcagtagcccaggccagagatgatggcttccagcagaatattgacagtgggaatggaaaagtagaaggattcaagagtttagaggtgaagctgacagaagttgctcgtggttggtgttggaacttgagagtgaaggtggttggaactgttctgacgtttctgccttaagcagcatcatggattatgggcctactcactcacattgggattgctggaagaggaataaatttgtaggaggtagaactggacttcactctcggacactgaatcgaagtgcctttgaaggccaggcatggtgactcacgcctgtaatcccagcactttgggaggccgaggtgggaggatcaccagaggtcaggagttcgagaccagcctggccaacatggtgaaaccctttctctactacaactacaaaaattagctgggcgtggtggtaggtgcttctaatctcagttactcgggaggctgaggcaggagaattgcttgaacgtgggaggcggaggttgcagtgagccaaagtagcgccattgcgctccagcctcggcgacgagcaaaactccgtctcaaaaaaaaaaaaaaaaaaaaagaaagaagtgcctttgaagcatccaaattccaatgttgtgtaggtagtgagttatatgggtctggaactcaaaggagggtttggatgggaaacatgtttggaatagccagcctccatgatttgaagttgtagatgtgggtgagactgcttacagagaagtttttctcaacctggactgcactttggaatcactgaactttgacaaataccacccaccccagagattctgattcaattaacctagagtaaagcttgggcattgggcttctaggaactccccagatggtactaatgtgcagtcacggttgagacccactggcctagagagaacctaggctgagactaggagaggaatcaggattgagccttgaacacatatggccaattggagaaggatgagcctgcccaggagattattaagatgtgaccagagaggtggaacaaagactaagtgtggtgtcatagaagtaagtaaaagagtggtcagcagtgtctgttggctactgagaagccagttacagtggaacttagatttggcaacatggacatcattcactaaccttagggggagctgtcagtgggaagcttgaaacatgccaattagatggggttgagaaatgcaaggaaatggagacagctagcgtaggcagcttttaaaggtgtttggggagagagacccagggtgagtctctttaaatggtaaagaaaacttaccttattcaagagttccagaagaaggtggcactagggttgtatattcagtggctcaacaatgtcatcagagacttagatttttccagcctcagtgtgtgacttggtcctcaggctgtcccctcagaatgtaggatggctgctgtaattcagacatctttagcagaagaaggacaactttgtcttatgtcctttaaaaaaaatcttaatacacatgctgaaaagtatacaagtgttaagtgcagctggaattttcagaagtcaaacaactgtaaccagcatgcagatcacaaccccagtaccccagaagttcctcttagtcatgaccctcctcctagtcatgatccatctcctcccccaggagaactaccatcctggcttccagtggttaattttgcctattttagtacaatgtaatgaaataatatactatgtgttcttttatgtttggttttcagcatcgtttttgagatccatattgttgcatgtagttgtaaagtgttcatctattgcatgaatataccacattttatccattctattgttgatgggcatttgggtagcttctcctatttggcttttacaggtagtattgttgtgaacatatgtatttatttctgttgagtgtataattaaggagtggaattgttgggacagagggtatgcttatatgcatttagctttcctgtgtgattgtatcattttgtactcttacagcagcatatgagaatttcagttctgtgccctcaacacttactatttttcatcttttattttagacattctggtgggtgtgtagtggtataccgctgtgattataatttgtattttcataaattgattaaggatgtttcagattttcataaggttattgaccatttggatattctcttttgtgaagtgcctgttgaagtcttttgctatttttttctcttgagtagaatgccctattcatttttaggagtttttcttttgtattctgaatatgagtcattggtcagatatatgtattgcaaatatcttctcacattcagtggcttgccttttcactgttgatgttttcacaaacaagttactaattttaatgtagtacagtttatcagttttttcctctgtgataagctctttttgtgttctgtttatcatctttacccattcaaaggtcaccagattttctatgtttcatctaaaggtttaattgttcaactttgatgtacagatctgcagtccatctggacctggtgtttgtatttagtgtgaggtagtgttcaagattcatatgggccaggtgcggtggctcatgcctgtattcccagcactttgggaggacaaggcaggagaattgcttgagcccaggagtttgagaccatcctgggcaacatagtgggaccgtgtctctacaaaaaaattcaaaaattagccagaaattagctaggcatgatggcatgtgcctatattcccagctactcaggaggctgaggtgggaggagcgcttgagcctgtgatgtcaaggctgtagtgagagggactggcactgcactccagcctgggtgacagagtgagcccttgtttcaaaaaaaagaaaaaagatccatatggatgtccaattgacccagcaccatttattaaaagagtatattttctccatgtaccgcagtatcacctttgtcacgaatcaggtcattatgtgtaagaatccatttctagtttctctgttctattttgttggtcaggttgtctatccttatctagttggtttttttttttttttgtacgtaaccttttagtaggtattgatatctggtagtataagttatctagttttgttcttccttgtaatctctttaagagtgatgaattagcataaatatgaatgtgaaatgatgaaccagcaaatattaatctacgttgaaaaaagaaggtggataagtcagtgagttgggtaccctgaggagataggaacaattgaacaagttaaatgggataagcaaggttatagtgagaggtggatacctgaattagtgattgaacagtttgaagtttgaacagttttgagtttgaacaccctaagttccaggggtgcagtgatgggtggctgagttgggctagaggtggaagtcattgaagataaggaagccaggaaactgatagactgtggtatggatctgttagttcttgataggttatgaaagtacatttaataatgtagtatctaatttaatatctacctcagaacaggtagaacagaattatttacattttacagatgagaaaaatgggcccagagatgttaataactccctaatagccccaagaaaattagtgattaaattagacctaacctgggtcttatggtctagcttccatgctctattcagtgtagcttaactgatgttgtgtgaaagacctggtagtgatacatttggaaagtcttactgacatgcagaaatagtacagaaaaacatacaaataggaatgttattggctgggcatggtggctcacacctgtaatcccagcactttgggaggccaaggcgggtggatcacaaggtcaggagatcgagaccatcgtggctaacatggtgaaaccctgtgcctactaaaaattcaaaaaattagccgggtgtactggcatgtgcctgtaatcctagctacttgggaggctgaggcaggagaatcacttgaacccgggaggcaaaggttgcagtgagccaagatcacgccactgcactccagcctgggcgacagagcgagactctgtctcaaaaaaaacaaaagaatgctatgcataggtacaatgtcgaaatgtgcaagaaatacttcagaaatattaaaagtagttattcctgggtagttgtgattgtgactctgggtgactttttccctttgttttatttttctgtattttccaaatttcctataatggacatatattatatggattttttttaattaaaattatcttttgactagataatatacatggaaaattcacaaagtacacatatgcaagatataatacttttactataaaagagtgaaaatttttaaatacttgtttttccttttagaaatgcactcggtgatggaaagagagccactattctgaagaacacttggccaaaggtaggtttcttctgtattttatattgagcaaataatgccatacaacattgtgaaaaatctgtttatagggtgtgtttgttcataaaaatgctatatgaaattacgtagagctccagaatgtgaaaggggagtcatcagatccatgatcagcgtggggacccagccacagcactgacaggctgtgcgtgaggacaggtggcctgtgggcatcttgagtcttcagggtgccttagtgattgagaggtcatctctgcgtattctgggtgggtgtgcctgaatgtgaaaaatgacttaaaactggggaggaagtataggaggctgtctttataggaggcaggaaaagatttcttaacacacagtgcacaaatcagcagtgaagacaaccatcttgatatatttggctatatcgaacttaaaaacttgtgtatgtcaaaaggcaccatagatgaaatagtagtttgagaggagataatttgccacatatataactggtaggatttacagctggaatatgcacataattcctaaagtaaataagaaaccccgtagaaaatgggccagtaaaacaagtaagcatttcacagaagagtaatcctgaatggccaatagaaataagaaactatttcggtaggggtggagccaagatggctgaataggaacagctccagtctacagctcccagcgtgagcgacacagaagacaggtgatttctgcatttccaactgaggtactgggttcatctcactggggagtgctggacagtgggtgcaggacagtgagtgcagcgcaccatgtgtgagctgaagcagggtgaggcatggcctcaccggggaagcgcaaggggtcagggaattccctttcctagtcaaagaaaggggtgacagatggcacctggaaaattgggtcacttccaccctaatactgcgcttttccaatgggcttatcaaacggcacaccaggagattatatcccgcacctggctcggagggtcctacgcccatggagcctcgctcattgctagcacagcagtctgagatcaaactgcaaggtggcagcgaggctggaggaggggcgcctgccattgctcaggcttgagtaggtaaacaaagcagcccagaagctcgaactgggtggagcccaccacagctcaaggaggcctgcctgcctctgtaggctccacctctgggggcagggcacagacaaacaaaagacagcaataacctctgcagacttaaatgtccctgtctgacagctttgaagagagtagtggttctcccagcacgcagcttgagatctgagaacgggcagattgcctcctcaagtgggtccctgacccccgagtagcctaactgggaggcaccccccagtaggggcggactgacacctcacacggccgggtactcctctgagacaaaacttccagaggaacgatcaggcagcagcatttgcgattcaccaacatctgctgttctgcagccactgctgctgatacccaggcaaacagggtctcgagtggacctccagtaaactccaacagacctgcagctgaggctcctggctgttagaaggaaaactaacagaaaggacatccaccaccaaaaacccatctgtacgtcaccatcatcaaagaccaaaggtagataaaaccacaaagatggggaaaaaacagagcagaaaaacctgaaactctaaaaatcagagtgcctctcctcctccaaaggaacgcagctcctcaccagcaatggaacaaagctggacggagaatgactttgacgagttgagagaggaaggcttcagaagatcaaactactccgagctaaaggaggaagttcgaaccaatggcaaagaagttagaaactttgaaaaaaaattagatgaatggataactagaataaccaatgcagagaagtccttaaaggacctgatggagctgaaaaccacggcacgagaactatgtgacaaatgcacaaacctcagtaaccgatgcgatcaactggaagaaagggtatcagcgatggaagatgaaatgaatgaaatgaagcatgaagataagtttagagaaaaagaataaaaagaaacaaacaaagcctccaagaaatatgggactgtgtgaaaagaccaaatctacgtctaattggtgtacctgaaagtgacggggagaatggaaccaagttggaaatatctgtaggatattatccaggagaacttccccaatctagcaaggcaggccaacattcaaattcaggaaatacagagaacaccacaaagatactccttgagaagagcaactccaagacacataattgtcagattcaccaaagttgaaatgaaggaaaaaatgttaagggcagccagagagaaaggtcgggttacccacaaagggaagcccatcagactaactgctgatctctcggcagaaactctacaagccagaagagagtgggggcgaatattcaacattcttaaagaaaagaattttcaacccagaatttcatatccagccaaactaagcttcataagtgaggagaaataaaatacttcacagacaagcaaatgctgagagattttgtcaccaccaggcctgccctacaagagctcctgaaggaagcactaaacatggaaaggaacaaccggtaccagccactgcaaaaacatgccaatttgtaaagaccatcaaggctaggaagaaactgcatcaactaacgagcaaaataaccagctaacatcataatgacaggatcaaattcatgcataacaatactaaccttaaatgtaaacgggctaaatgctccaattaaaaggcacagactggcatattggataaagagtcaagaccgatcagtgtgctgtattcaggaaacccatctcacgtgcagagacatataggctcaaaataaagggatggaggaagatctaccaagcaaatggaaaacgaaaaaaggcaggggttgcaatcctagtctcagataaaacagactttaaaccaacaaagatcaaaagagacaaggccattacataatggtaaagggatcaattcaacaagaagaactaactatcctaaatatatatgcacccaatacaggagcacccagattcatacagcaagtccttagtgacctacaaagtgacttagactcccacagaataataatgggagactttaacaccccactgtcaacattagacagatcaacgagacagaaaattaacaaggatatccaggaattgaactcagctctgcaccaagcggacctaatagacatctgcagaactctccaccccaaatcaacagaatatacattattttcagcaccacaccacacctattccaaaattgaccgcatagttggaagtaaagcactcctcagcaaatgtaaaagaacagaaattataacaaactgtctctcagaccatagtgcaatcaaactggaactcaggattaagaaactcactcaaaaccgctcaactacatggaaactgaacaacctgctcctgaatgactactgggtacttacgaaatgaaggcagaaataaagatgttctttgaaaccaacgagaacaaagacacaacataccagaatctctgggacacattcaaagcagtgtgtagagggaaatttatagcactaaatgcccacaagagaaagcaggaaagatctaaaattgacaccctaacatcacaaaagaactagagaagcaagagcaaacacatgcaaaagctagcagaaggcaagaaatatctaagatcagagcagaactgaaggaaatagagacacaaaaaacccttcaaaaaatcagtgaatccaggagctggttttctgaaaagatcaacaaaattgatagaccgctagcaagactaataagaaaagagagaagaatcaaatagacacaataaaacatgacaaaggggggatcatcactgatcccatggaaatacaaactaccatcagagaatactgtaaacacctctacgcaaataaactagaaaatctagaagaaatggataaattcctcgacacatacactctcccaagactaaaccaggaagaagttgaatctctgaatagaccaataacaggctctgaagttgagccaataattaatagcttaccaatcaaaaaaagtccggaaccagatggattcacagccgaattctaccataggtactaggaggagctggtaccattccttctgaaactattccaatcaatagaaaaagagggaatcctccctaactcattttatgaagccagcatcatcctgataccaaagcctggcagagacacaacaaaaaaagagaattttagaccaatatccttgatgaacattgatgcaaaaatcctcagtaaaatactggcaaaccgaatccagcaacacatcaaaaaggttatccaccatgatcaagtgggcttcatccctgggatgcaaggccggttcaacatatgaaaatcaataaatgtaatccagcatataaacagaaccaatgacaaaaaccacatgattatctcaatagatgcagaaaagtcctttgacaaaattcaacaacgcttcatgctaaaaactctcagtaaattaggtattgatgggatgtatttcaaaataataagagctagctatgacaaacccacagccaatatcatactgaatggacaaaaactggaagcattccctttgaaaactggcacaagacagggatgccctctctcaccactcctattcaacatagtgttggaagttctggccagggcaatcacgcagaaggaaataaagggcattcaattaggaaaagaggaagtcaaattgtccctgtttgcagataacatgattgtatatctagaaaaccccatcgtctcagcccaaaatctccttaagctgataaccaacttcagcaaagtctcagagtacaaaatcaatgtgcaaaaatcacaagcattcttacacaccaataacaaacagagagccaaatcatgagtgaactcccattcgctattgcttcaaagagaataaaatacctaggaatccaacttacaagggatgtgaaggacctcttcaaggagagctacaaaccactgctcaatgaaataaaagaggatacaaacaaatggaagaacattccatgctcatgggtaggaagaatcaatattgtgaaaatggccatattgcccaaggtaatttatagattcagtgccatccccatcaagctaccaatgactttcttcacagaattggaaaaaaactactttaaagttcatatggaaccaaaaaagagcccacattaccaagtcaatcctaagccaaaagaacaaagctggaggcatcatgcttacctgacttcaaactatactacaaggctacagtaactaaaacagcatgttactggtaccaaaacaaagatatagaccaatggaacagaacagagccctcagaaatagtgccacatatctacaactatctgatctttgacaaacctgacaaaaacaagcaatggggaaaggattccctatttaataaatggtgctgggaaaactggccaaccatatgtagaaagctgaaactggatcccttccttgcaccttatacaaaaattaattcaagatggattaaagacttcaatgtttgacttaaaaccataaaaaccctagaagaaaacctaggcaataccattcgggacataggcatgggcaaggacttcatgtctaaaacaccaaaagcaatggcaacaaaagccaaaattgacaaatgggatctaattaaactaaagagcttctgcacagcaaaagaaactaccatcagagtgaacaggcaacctacaaaatgggagaaaatttttgcaacctactcatctgacaaagggctaatatccagaatctacaatgaactcaaacaaatttacaagaaaaaaacaaccccatcaaaaagtgggcgaaggatatgaacagacccttctcaaaagaagacatttatgtagccaacagacacatgaaaaaatgctcatcactggccatcagagaaatgcaaatcaaaaccacagtgagataccatctcacaccatttagaatggcaatcattaaaaagtcaagaaacaacaggtgctggagaggatgtggagaaataggaacacttttacactgttggtgggactgtaaactagttcaaccattgtggaagtcagtgtggcgattcctcagggatctcgaactagaaataccatttgacccagccatcccattactgggtatatacccaaaggattataaatcatgctgctataaagacacatgcacacatatgtttattgtggcagtattcacaatagcaaagacttggaaccaacccacatgtccaacaatgatagactgggttaagaaaatatggcacatatacaccatggaatactaagcagccataaaaaatgatgagttcatgtcctttgtagggacatggatgaagctggaaaccatcattctcagcaaactgttgcagggacaaaaaaccaaacaccgcatgttctcactcataggtgggaattgaacaatgagagcacatggacacaggaaggggaacatcacacaccggggcctgttgtgaggtgggaggggagagggatagcattaggagatatacctaatgctaaatgacgagttaatgggtgcagcacagcaacatggcacatgtatacctatgtaacaaacctgcacgttgtgcacatgtaccctaaaacttaaagtataataataataataataataataataaagaaactatttctatttcctagtaattaaaattgtagggatttggtacacagataaaagaatgaaaccaatagtgcagaatagagggcctccacacagaacccactatgtgagtaaatattacaatgtcatattgtctgagtccttcagattggcagaaattaaagaggctgatagtctggtgttggtgggtatgtgtagtaacaggaagccccagtaaactggtgggagtgtgattgcttacaaccaagtcagggagcactataatagactccacagttacttgattctgagtgtgtgtgctctagaaaatttcttgcaaatgtgcacatggtttgatatgcaaggttggtcattgcagcattgttttaatggcacacaactgcaaatacctacatgtctattgataaagcagcagataaatgtggtattttcacttgatcaaagttgttactctgacctgtgtgatctgtccccgtcttgaacacttgttgtttctccaacctcactgctcctgctctgtccctggttcactttatcttggcctcttggcatcctcactgttcctcagacattccaggcccacttccactttgtacttgcccttccctctgcctagaatgcttttccccagagcgttggccagcccccttatttcttttcagtcgatattgaaaggactcttctcagtgaaacattccttggcctcattactaaaatgccaaacacctcacttcctacgcatttcttatcttctttccttgctttacttttttcttcttaggacttaccattatctaatacattatatctactgtttgagttatagtggctattgtgtgtcttccagtataatatgagctccacaaggaaagatttttttggtgtttggttcacttcactcttgaatccagactgtctgacaagctgcctgacacttacttagcaggcactcattagtaaataattgttgacttagtgattgaatgaatcaaatagtagattgcagttgaattagctggcttatcaacatttatggattttaaaaagttaaatgaaaaagtcaataaaacataggctggaaaaatatctatcgagttcatgatagtgtttgcttctgggcagtaagagagggaaaggagattggagagggtacaaaggagatttcagccatatctgtatcatcagaaatagttttatttatttcatttaaaaatcagaagcaaatataacaaaatgttaacagttaattctgggtatctgtgtattagtctctgtattttcctaaattataaaaatattttttttttaagtgaagctttagatgccaggcatgatggctcacacctgtaatcctagcacttcaggaggctgaggcgggcagatcacttgaagtcaggagttccaagaccagcctggccaacatgtgaaaccccgtctctacaaaaaaattttaaaaaattactggatgttgtggtgcattcctgtctagctactcaggagtctgaggcaggagaatcacttgaacccaggagatggaggttacagtgagctgagatcacaccactgcattccagcctgggtgacagagtgaaactccatctaaaaaataaaaaaataaaaataaataaatttttttttaagtggagctttaaataagatatagaaaggcacatgtatttcatacttcattcctggttttacgtaatttaaaaaaagctagtgcaagtagaatcagaatttgaaggccttagggaatttagtctaatttgatacttccattactgctctgcggatagccttcattagattaattgtaggagtttattttgtttaatttttttaaatgaactttatattataaatatcacatgattaaagagaaaaatagaatatagcaaggtataaagtaaaagggaaaagtcagcctggagaccttgtttaaaagacagatttcttcgcttttcccccaaattgtgattcaggtggcctaggaatgtatctaggagtgtggagattgtaaaattccccaggtggacttctgcatccagattttagaatcattttttaaatgccttattttacacatgaagcaattgagtcccagagaggtagagtgatttttgcaaggtgtcattgcaaataaaagacaaaactggtggttctgtttgagggtgaccagtttgttggtattttcattatgagtcattcttttgcttgaaacaaaatctttgctgatccttgaacctggtgtttgacaggtgctatatcaatatttgtaaaatgaatgaatgaatgatagaattccaaatactgaaacccaaaccatgatactggttttccagaaatacttcctgctattttaatatattatcaattaagaaaaacagttattaaaactttttgaagacctggcgctcactcctgtaatcccagcactttgggagggcaggacgggcagatcccttgagttcaagaccagcctgagcaacatggcaaaaccatatctttacaaaaaattagttgggcatggtggcatgtgcctataatcccagctacttgggaggctaaggtgggataatcacctgagcccaggaagtatgaggctgcagcgagctatgattgcgccacttcaaaaaaaaaaaaaaaaaagaaaaaagaaaaaaactttaacaattattttgagaactttgtggagaatacttgttcctggcttagtttcttaaacaaaatattcacttttttttttaaattggaatgtttggtgatgtccaaacatcccttctcaggggatactctcttttgttgccttgtattggtgatgtgtcgtatgattgcagaaatatttgtatagataaaaacatataaccactagtaagtattttaaaaatttggtaactacataactaggttatttttcttttttttttaaaaccagaaaagaatgcttattaaaggataaacttcaggagcaaaagtagatcatacagggtatatttacttttataagattgccttactttagaattaattatgagcctgagtctatggagtcatacctctaagatgtaagtgtgttagtggaatgtattctgtagatttctatgtgagggtaggacatttttttccttcttcttaatggggaagattagtacagtgctacctgtctctagactcactttcaggatttagaaagaatgagtcatttgtcctgaagagtgagaatttttcttagcctcaacagatatgtttgtgcaggtctgtgagcattgtgttttgatctatatcatataggatacaaactaataacctcagaaatgtcctcaagaacatttaaattttgaggggcgcattaggacttttgttgtgaatgacagaaactgaactcagatttgatttaagtagaaaagggaattaattggctcatgtaactgagaagtctaggggttagcttcaggaatggttggatccagatttgtacacatctttctttcattttctcaactttgcctccctgtttgtcagcttcatgtttagtcttttttctagcttccctctctgatttttacatggattctcttgttatgtcttcaagctcacccatcttttcttctgcagtgttttatctgcctttatttccatccaatgtacttttcatcttaaatgctatagttttcatctctagaggttaaatttgggtctttcttgcatatttcatgtctttaacatattccatctttcctttcacctcttgaacacataggggatagttataataagtatttcaatgtccttgtctactaatctgtgtcatttgtgggttgttttcagttggtttattttgctgttcattataggtcatattttcctggtaattgtagatggatgccagatattgtgaattttaccttgtttggtgctggatattcttgtttttctttaaatatgcttgatctttgttttgggatgcagtaaagttacttagaaacaattttaattcttcaaggttttaagattttttttaggcgggactatagtggcatttaatctagggctaattttttccccactactgaagcaaaacttttctgagtactctacttgaagtagagaattcaccccatgaattatggtgtttttcactcttgttgataggaacaggaattattcctgatttgtttccgttccggctcttgttccctgttaacctttcaggttgttctttccctggctgtggaccgttgtcccccagggatgtgctgatcagtacttagctgaagactcaaggggtccctctggagttctccctgtgtgcagctttctcttctctggtcctctgctctgtgaactcagctgccttggtcctctgtactcccgcttctgtctccttaactgagagaggctgccagtctctgcctaggttttctcttcccatgctctggcttagagacattcttatcagtaagcgggatcaatcacagggcttactttatatgtttttcatactctcttttgttgccttgttttcaatgtcttgcaagctgtggtttcttatcttttgtctttgttttaggtaggagggaaaaatcaagtccttattacttcattttggtcagaagtggaggttagagtgtaggcgctcttggttttatttttaaaaagacttttaccatgtagtgggatctgcaaactgatgtcatgagtagctgttaattctaggaaaaggagaccctctctcagtgtgtgtacagtagaccttagggatgcctcagactgattctgattgagtcatgtgcccacctgtggatttattgctttgacctagaaagtagtgcatttcaattggccagtctcctgggttacagccacacttccaccgtgccgtccattgttggggtggagcactggaactgacagtcctgctgttactgtgagaagtgggaacatggtggtctcctaagtgaggggagactagagagatgagcaagagggaatttccacatgtgtgatagagaatgagatagtgaaaagacctttttattgtaattgggtttcagaaactctgagatacctttaatttaagcttcattgaaataacttcagtagggaggtctgaattaagtcttttctcaactaacaggagttacattatgttttatagggttcagggaaaaggatccaataaaaggtgagaaaagtatggagaaaagagaaagaaataaagttctctgcaaatttagtagatttggtttatgatctatcattatttcttatgctagctgtgggttttttaatgcagttatttaaactttgaagtccgtaaatgcttaggggataggatttgaccttgtagcctatctgagagatgcctttgtcttcttatactttaggtgtcaggaagcatggcctataccctttcagcaaaacagagtttaatgaaatgccatatgaattggagtctgagctaagcccaaatagtctgtctaaaaaaactccagaacctttagagccacacggtaccccagagcaggattacttatggtaaacctgcataaacacgtacccacgtaattgtttctggcttcttgtagtgaaaagctgatccttcttaaaagcgttgtttgttttttataatttctcctagattttcactgaatcacagtgttctttgtgaaatgtgtagtgaagaggaaagagctttggaccaggtgtcataaaaatcagggttctttggtttgcctcttaagtaagtgtgatattaggccagtttctagcctctagcctctttcactagtaaatcaccttgccagtagtactgtgcctaaaatgggaatttggtttgggaggagctagaagcagggttggttcagttagcttcaggttttggtactgttagctttgtagattaaaaagtttatacttaatatagaagatttccaaaatatgtaaatggaccagcaaagattttggttctgtagcaaaaaacccttatcattggaattaaatgtaaatccctggtttttggtttcttaaagccaggagctgcacttagagataacaatgaaaagctgagtgaaggggagacggctggatggaagatctagcctgagcacatcccccatctgtctgcactcttcggaggtatcggaaaaccatggcacaggcccatggttccatccagctctaaaaacttctcgatttccaggtgtaggaaaggcgatgacttagagattgttactgccttcaaatatttttaaaacataaagttatttataatgaatgacattttttactttatctggcacaaaattattatattctctgttagcaaaatataacaaaagttgaactctgctgggggtacagaaatttcttaagcaaaaatattgatccttagttattgtgattatttgtgtatttataacttttcacttagctcattaggtaatgttatttcctgaggtattaacattttacatttatttttcattggtagggacctaatctaatattttaagtaatgaatcagttttcaagcaaaacatttttccttacctgttttctttaacttaagcatatttttgagaaaaaattaaatttatctttttggaacagggtcattatcgttattgtgatgctctttctatgctgggggaatatgactgggccctgcaagcaaacataaaagctcaaaaactctgtaaaaatgaccctgagggaatcaaggatctaattcagcagcatgtaaagttacaaaaacaaatagaagacctacaaggtatttcacctaagattcttttggttacagtcttaattccctttcaaactttggagggtgggtttcttggattaacagaggaccacaaatcaatcctcagatgatttatccttattttatcatgttatcttggtcatggcacttgagtttttcatttctatctgtgtagagttacatgttatccattaagtaattataaatgatttgtactttttatttgaaacagacagcaaccaaattgttatttattcctctgtagaaaaaaaaatccctttcagaaattttgaataaaataaaagcttttttgaaacaaaattatttaaaaatatttccttcattgctaaagttatttcctaaagaaaagacccttcagtagagctgcttgatgtttccgcaccatttgtgctaattctgcagcgtgctgaatatatatatatataatatatatatatatatattatatatatatatataatgttttttatatatatagcagaaattggctgtgcaggctaggagttgtagattttcattctctccttgttttctctcctaagtctttttgctttctccaatgcctgaaagtcccttagtctacatttttagtgtatgagtctttcctgctttttcttcttcgggttgtacaaagctgagctgaacagctctgtttgaccggcagatgttgttatccatcataacatgattatgtaataagatggtgagctccttgaagacaggtgccacctttgattcagatttacatattgctgtcatcttgtcaatgatcacatgtgatggaatgtcagacaaagtttgtgtaacattttgttgacaccatcctaaaactaaagacatctagaaatgtaaaattgcttagatttacttttcagttttctaaatttgaggtccttactatcagcttaaagtaaatttgaaatcttttaaagtctgtgttgccaatccattgattactatgtgtgtgtgtgtgtgatgacttttataggtcgaacagcaaataaggatccaattaaagccttttatgaaaacaggtaagttaatagcaggtcagtagctgctactactaggaatggctttgctgcatgaatttaagaatcacttatgtttgacgctttaggagctaatagcaaccacagtaaagttggagatggaaggaagagaggtagttttttaagtgtccgtgttatcaggtgacctgtaagttgtcagatttatttcgctgttttagtgaaccatatagatataagctcagtagcctaatcctgtgggaaaagaggggtgaaatgttaattggacattactatgcttggatgggaccagtttggccatgaaactcctggcagcacagagctaggacatagcctgtgccctgtgcccttcacctctgtcttggaagtatctatggcaaaaaccacaattacttttgcaccaacctaatatttccagcttcctgatgtctttcaaaggctaagatacttcctattagaaataggcaacagatagacttgagtatgctcacaagaaagcaatagcagccagggttctacctttacttatttggcaattaaaacagattaaatgtttttctgcattcttgttcagatgtctgggataccgaagctgctaattctgtagcatgctgaacatgtagacataaagaaattggctgtggaggctttaaatttaattttagtatcctaatttaacttaacttaggatatttaaatttagcacaaggtcataggtatttttttttttttaatttttttgagacggagtctcactctgtcacccaggctggagtgcggtgttatgatgtcggctcactgcaacctctgcctcccgggttcaagcgattctcctgcctcagcctcttgagtagctggggccacaggcggctgccaccacgccctgctaatttttgaatttttggtagagatgaggtttcaacattttggccagactggtctcaaactcctgacctcaagtgatccgctcgccttggcctcccaaagtgctgagattacaggagtgagccactgtgcccagcctgagccactgtgcccagctgatatttaaatgttagaacgcagaatacttctttttgaactgttctttttttttttttttttttttttgagacagtctccctctgtcacctaggctggagtgcagtggcacgatcttgggtcactgaaacctccgcctactgggttcaagcaggtctcctgcctcagcctccccagtcgctgggattacaggcacatgccaccacacctggctaatttttgtatttttagtagagacgggggtctcaccatgttggccaggctggtcttgaactcctgaccttagctgatccacctgccctgggctcccaaagtgctggaattacaggcgtgaaccactgcacccagcccttgacctgttctttattattttgagtttaatgccaaatataaaataatgtttatgtataaagccccatctcacaggtaggaaatctttttaaaacaataataccttgctttcaaggaaaaaaggctgtgattgctgcaacctgttcattcaaaggataactttcaaaaaatgtataataattccttttttcccccacttagggcctacacacctaggagtttatcagcacctatatttactacttcacttaactttgtggagaaggaaagagatttcagaaaaattaatcacgaaatggccaacggtggtaatcagaatctaaaggtaagctccattgaaaactacagtttttttcaaggatagatagtctcatatttttacagtaatattttggtggtaatagaaaccaaatttttggcgatttgaaccctttttgcctattgttactgaaataatgattctcttttaaataaataatctgagtatctcatataactacgtaaataatatttgaaagtcacagaatttcttttgaaatcacatttatgtgtttccaacatatttttaaaaataaccattttgccgcttctctttgtatcttttcccttcggttgttggaaaagtcctcttgttgataatattgaaaatttctaagagactgtgttcagttagggagaggagtttataccgagcatctccagctggatctggaattgtattgagcatttccagctggatctgaagctaagggtctgtaaacactcacctcagcctgccttagcagcccttttccagccttccaccctttttgaggtcttgaaatcacacaggtttacttagtgcttccgaaatgaactctactcttgggttcaggccattctgtccaaatcgtacttctttctcaaaaccaaacacaaatgctgtatcctcactaacatttttcttaaccactccagcttaagtgatttttcccttttgtgagttgtgagagatattactgactatgcaatttatatgtcaataacaacacagtattttcttttcttcataaggatggttgttgtttaactactgaagtgatgtgtcttttcaccccatctgattgtaaactgagaacgggagttatctcctgtatctctctgtatctatggtagacctaaatcataataatgatcgctattataattgatctttaataattgattatatttaataatttattatatatagaaaaatatcatcagtagcttcttttttggcttacccttttgtagttacactcacataccacattgctgcttctgtttcttactccaatttatattttaaaaatagttttactctcaggcttgtagatttttatgtacagatgtgatagtgttaattcaaacattattgaacaattgtcatgtcagacatcgtgctaggcaatagaaatagaattgtcattcaagaatttgttcgttgccatatcatgatccttatcattagttatcattttgtttgcttgtttatacatttaggcttaataaccagctgcatattttagctgctagggtgaattctatcctattctattctaaattcttttatatagctattgaattcttcatggctgggttgttttttttttttttaagtctcactaatttcattggcaggtggcggatgaggcgttgaaggtagatgattgtgactgtcatcctgaattttcaccaccatcaagtgagtattgtttttatatcaattgttgccaagttaatataatgtctcctaaatttggatgccctacaatgtgcacaagccttgcttatatccactcttgttctcctttactttataatgcttctatgttaagaaaatattgaatatttatttgaaatcaatgctcagtctttttgtattatttagtgaatgtaattttggaaattcaaataaaaggaaaggaaaagatgaagtacatagctctttttggtctgcttcttaattttttttaggctgttgtttctcattattgaaagtttattattgcctcccttcctcccacctgctaggagcctgtttagacctttttaaatctaattgttctccctcataaaattttaatagctgtttatgtaccatatgtgcatctgcgctttatgtataaaaggaattgattttgtctcccaataactaattttcaccctattgggggtgatatcacccatattgagaacagatgctgctgtaacaaaaataccataaactagatagcttataagcaacaaacatttatttctcacatttctagaagctgagaaattcatcatcatgatgtcaacagattcgatgtctgctgagggtcttcttcccggttcatagatggccatctttttgccgtgttctcatgtagtagaaggagcaagacagccctctggggtctcttttctttttctttctttttttttttttgagacagattcttgctctgttgcccaggctggagtgcagtggcatgatctgggctctctgcagcctctgcctcctgggttcaagcaattctcctgcctcagcctcccgagtagctgggattacaggcatgcactaccacaccaggctaatttttgtatttttagcagagacaaggttttgccatgctggccaggctggtctcgaaatcttggcttcaagcaatcctctcgccttggcctcccaaagtgctgggattgcaggtgtgtgccaccacgcccagcctggggtctcttcttataagggcactaatcccattcatgaggggacagcctcatgacctaattcctcccaaaggttccacttcctattaccatcgccttgaggatttggttttcaacatgtgaatcttgtcggggacacagatatccagaccataacagtgctgtaggctaagtctcatttgttttaagttgtgtgtgctcagtgcatgtatttatttacatatctagtaaacacagacaccgcagaacctcattacttggcatcatttggagatgaaggttctggagaagtgaatatttttgtgcttcatttatttctgaatcttaataccaccagagtttgatgaaaatcctctaaagtatattacatgcttccctgccttttaacacggaatttaggaaaatacaggttttcttgatggcttaaggttgtggtcacacataacagtgactgacctcaagcctggtggtgttcctcccaggattcttcaggtgagattgttgattttttagttagtgatcctctcttttcccttgtcttgtttgttgggtggttggtttttctttccatagttttgcttctagcagccatttctattttttgtgacctgcagctccatgttcgctcaggctcagttagttccatagatacagctacttagtattgagcatttccatttggttagcacattagcgtaatgatagggaggggaaactcaggcagttgtcctacctgatgcagttccaacagcatataaaacatctttgaggataaaacttttttttggaagatagcttttaatttcttcatatttctcaggccattactatcatttaattaaataaattctgtccacccttcagcatttacatacaggggaagaaattgaggttccaggattaaggttaagtagttttgtccaaggtcacagaatggaaatcaaactagaattcttctacctttccaaaagctgcttttgttttctgaggccaccaaagcccaggctctcattccctccttattacattggctctgacttgtgtctgtgccctccccttaaaccttcatcagatgcaccctgctcctcctgccataccagttcttctacacagctctgagcatggctctccctgcccaaaaatatgcagtggtttcctactcctgccagcagaataaatctgggctcacagagctggatctgaagctaagggtctgtaaacactcacctcagcctgccttagcagcccttttccagccttccaccctttttgaggtcttgaaatcacacaggtttacttagtgcttctgaaatgaactctctactcttgagttcaggccattctatccaaatcgtacttcttcctcaaaaccgaacacaaatgccatatcctcactaacatttttctcagccactccagcttaggtgatttttcccttttgtgagttgtgagagatattactgactatgcaatttatatgtcaataacaacacagtattttcttttcttcataaggatgattgttgtttaactactgaagtgatgtgtcttttcaccccatctgattataaactgagaacaggagttatctcctgtatctctctgtatctatggtagacctaaatcataatgatcactattataattgatctttaataatttaatttattatatatagaaaaatatcatcagtagcttcttttttggcttacccttttgtagttacacccacgtaccacatttctgcttctgttttcttactccaatttatattttaaaaatagttttactctcaggcttgtagatttttatgtacagattttaggaacaaatacttttgtgttcacaggtcagcctccaaaacataaaggaaaacaaaaatctcgaaacaatgaatcagaaaagttcaggtatgttttttctctaaggtatgtttttttccccttaatatactcttcccaagaaaaaggaaaaaaaattgtttttcgagtattagctactttaatgtatgtattatgatgactaccaaaatccctttcaaatatcaaaagcatatctttaggaaaggataatttttggctaaaggattattaatcctggatattaatatattgacttctgaaagtcacataatatgaaatatttccatattaatttcttaaatcccagaatatgtactctaaaaggaaaaagcattaagagagatataaggtgcacatgaagcctccttccctgctcacctcatttgaccctcctgcagtcccttctctaaggcctcctccaggaatacactgttaacagtttcatgactattgggaaacttactctgcatacgcagacatgggtatgcatatttcagatgcccttttgagtaattattgttagaggaaaatctttcctaatgaattctgactacttctaaaatgaattctatcaaacatccccatgaaaattaacagtaattaattgcctcctatctttttttttgtttttttgagatagggtcttgctctatcacttaggctgcggtgcagtggtgtaaccctagctcactgcaggcttgaactcctagactctagtgattctttttgcctcagctcccaagtagccaggactactactgctactatggtgcacgtcaccatgactggataactaaaactaaatgttttttagagacagggtcttgctctgttgcccaggctggtcttgaactcctggcctcaagtgatccttctgccttggcctcccagagtgctgggattgcaggcgtgtgcctggccttgcctcctgtctttattgttaacaccccattgacaacaagatataaattgattacaatgtgaaattgtaaatcttttaatacagaagtttatgaagtgaattaaagtgatgttggagaaacagcaaagccatgtctgccacaatacactggttttcaatttcttctccatttcttaatctgaatccatgatagatgcttcagggggaatgatttgaatatcaaaacactaaaaaaaaatcagtgaagtctcatttcttttcaaaaatgaccatttttggatgctgctacaaaaattaaatacaaagcaaggatatagcatattattatgtttttctattatttgatagaaaaatcatgagtcttcttccctgccctcccctgtacccctaaagaaaccagatattaatatatgataattttttaaatgcagagttgtaattttaacctgttttatttaaaaaaaatttatttttctgatattttgtttcacttttccaactgaacactcctttattaggtaatatctaccatatgggactatttcttcattaaatgggataaccacgtaaaacacttagagccctggaacatagtaaatcttcagtgtactttagtcgtcattactgttaccaccatcattttcattattattagaatgactctggcctacagcttgctttttgtcttttacaaaatatcttgtgtttcttcccatgttcagaacacagagctcttccattcttcatttgctgtacagtattttgtaatatggctgtatcccccatttttgtgcatttaggctcttcattcctcttttcctccctcactttctatccctctatccatctctctctttttcttcttcctttgagagggatagatcagacagtacttcaaacatccttgcacatacacctttgtgcacctgttcatgtatatttacaataaatactttgtaaataatgtatagaagttgtttctgtagtgggattgctgtatcaaaggggatatgtaattttatctttgacagatattgtgaaatggttctcttagaaaataggcactgttcacactccgactaatctacaggagggtgtggtataataaaaatatatatatatttggtatttgtcccagttcctggtacagagctcccaaaacccatggcatttcctgaatgataggagtgtattttgttactcatcatgagcccctttccatgtacttgagtttatgctaatgaggtgactcaaggtagtgcctcagatagttcaggaggaggtctcgtcactggaaagaccaaacacctgattagagggttaagactttcagcctcatacctgacctccaaggagaggaggggggctggaaattgaggttaggcaccaatggccagtggttgatttaattgtacctacatacctacataatgaaaccttagtaaagtccttaaaagagggcatggggagcttctgggctgacgaacacattgatgtgctgagaaagtggcatgcccaaggggatcatgaagctcctcgcgccccccaaccttcctatgcatctcttcctcttggctgtttttgagttgtatcctttataataaattggtaatagtaagcacttccttgagttccattgtttttctagtgagcctgaagagggactcatgggaaccctcttgtagtcagcagggcaggagtgtgggtgacctgtgcaccccacttgcagctgaagtgagggcagtctggtgggactgattctttaccctgtgaggtctgcgctaactctgggagttagtatcagaactgaattgcattattgcacactcattttgtgttggacagttgaattgatacggaaaaatgacaatatttggtattggagaaaatctacacattggatgtcagaagtactttcagaaaactccacatcgagtgcctcagattttcttactctcaccaacttagggagtcagactttctgaaatgcttgtatcttattattagattttcccatcacattgaacatctttgcactgtttattgggcacatttattgttttaggcccatgttgttactagtgactacagatcaaggcaaataccccttaatttttctcttttttcaaaagctgtttttccatatcatctttataatcaattcatctggtttccctccacctctgattttataggaatgtttattgagattgcattggatttagagatttctaatagaaatattgccaaaatgccaattccccccaaagaatggccaacttgtatggctcaccatttactcactattttacatggccttcagtaaatatatttttttcttctatctgtcacattggagggatgagagcgaactaatattcagattctattttttttcttttttttttttttagatggagtcttgctctgtcgcccaggctggagtgcagtggtaagatctcggtcctgggctcaagcaattctcctgcctcagcctcccaggtagctgggattacaggcatgcaccaccacgccaggataatttttgtatttttagtagagacagagtttcaccatgttggtcaggctggtctcgaacacctaacctcaggtgatccacccacctcggcctcccaaagtgctgggattacaggtatgagccactgtgcctggccctattttttctttatatgagtagaacttttattttaaaatgatttttaaaaatgctttttttcttttagttctagttcaccattgactttaccagcagatttgaagaacatcttggagaaacagttttctaaatcttccagagctgcacaccaggtaatggagaagcttttccaatggaaaaagcaaaactctttgaacaaaacattgttcacatgaataaggttctaatcatgtacatctctaagttttttttatataattattgtattatattgtagttttgtagagatggggtctcactgtgttgtccaggttggtttcaaactcctggcctcaagcaatcctcttaaagtgttgggattacaggtgtgagctattgcactcagctattatagacatatcatttaatatatatgactgctaagaatccaatctatcactaatttaaatattaacttgataattacgttagctagaggtttaactaatgattagcactgtggaattatttgcttctcaaagagttaacagtagtattaactttaaatatttttaaaagatttaaacacagtttcattatacttattctaaaatcattagagggcaaacttttattctttaaatgatttaacttaatcagataatgttgtatataaaattctttttacgttacttcatgatggaaaatatacattaacatggaatagaatactcatttcaaaacatgtggatctttttttaggtatacataacagatattttacaaagaactaaaatagattcctaatcatttgcttaaaaacatttttgagaatttcttaaagttggagattttaaattatatctttttacattgatttttactgactctaaacaccatgaaatacttaaatagatgacagcctgtgaagatgaaaagactatttaaataaatatgatcgctgtttttgagcctctgtttgttcattcaacacagtttgattgaggctctctccatatgctggggagtgagagagattgggtgcacagtgatatgatttcggcctgctctgctggagctttcaggacagatcatttatgtcgtattgagggaagtgacttccaatgaaagcatgaggctgtatggatctgatttctagactgataaagaaagctgggcatggtggcacgtgtctgtagtcccagctcctcaggaggctgaggtgagaggattaaccactgcactccagcctgggcaacataggaaggccctgtcttatttatttattattttcttttgttttcttttttaagcctctcactagtttgggagccctgtctcttttaaagaagaaagaaaaagaatgagaacaagattaaaattgaatgagtttatgcaaggctaataactagtatttgtagggctagtatatcatcatttataacttcaagttcatatcttaaaacaagtatggctgtcatcgagcttttaagtttttctgaaagctgctcttttctatgcatattctggggagcgttctgccaaactttgattcattggttcaaaagccagcagaggccgggtgcagggtctcacacctgtaatcccagcattttgggaggccgaggcaggcggatcacaaggtcaagagattgaaaccatcctggccatcatggcgaaaccccatctctactaaaaatacaaaaaattagctgggtgtggtggcgtgcacctgtagtcctagctacccaggaggctgaagcaggagaatcgcttgaaccccgaggtggaggttgcagtgagccgagatctgccactgcactccagcctggacgacagagcaagactccatctcaaaaaaaaaaagccagcagaaggcttttgttaatgggtaaccaaactgctttttcctctgtgatttgtgcagtggggcctccttttggatcttcattgttaggaatggtgaggaatacaacatacatatttgcatttgcggcccctttgaatggcgcacacgtgtatagcaaggagtgaggagattttaggcttaatgtctagccttgcctctccaatctttgtggaactttggtgacttacagctattcccatgtcactaaaatatgaattcaaattataatgcgtattcaaattacaaagtttttctcactttaagggcacatgatagcaattttgtttttattttttattccttatgttattccttttgcatttaacctattgttatctctcccagtaattttatctacttatattcaaatatatgttaggcaggagtacagttaacaattacagtatttatttcttgcttagaattaaggtttgtttcagagcaggatggcagttgttaaaatctggtagtgatcagaatattgattgtatgttcttaagtgtctaattgttctactcccaaacaacttacttatttaaatgatggctgttgtttttcatatatattgttaaaacttaaaaatactgtctgtttagtctggagagcaagtgaggcttagtaccatgtagtgtaaaatgagccacctttgtcacaggcaacagaagaggtgttgcaattaggatggtaaagcagtaccttttcattttcactttaaaagtgtggtgctgagaaaggaatatgatgaataagggtagtttgggtattgatgtaaacattttatcattagttataaaatattactatgaacttggcatcttaggttttaaattaaaaatgtgtagattcaggttactgaaatagaatttcttttttccaggattttgctaatataatgaaaatgctgagaagcttaattcaagatggctatatggccttattggagcagcgttgccgcagcgctgcacaggcctttacagagttgctgaacggtttagatcctcaaaaaataaaggtaaatttgccatatcataacttgtttatcaatgctaatgcacctcagatgaatgcagaagagaaccaagggcttaactcattgtagtaatgtacctaagaccttgctgagattggctgaatctacttcaggttatgggaagcaggtactgctccaattcagacttcatgagtatgttcagtatgtgatccatgtttatattctctccttgactatagtttagggtcattagaactggctttttctctgaatcaaggttttcaactatctttagtcacaccttttcacccaggaagaaagtacaggcacacctcgtttcattatgctttgctttattgtactttgcagacaatgcatttgttacaaattgaagatttgtggcaaccctgtgtcaagcaagtctgttttctgaaagcatgtgctcacctcatgtctctgtgtcacattttggtaattctcacaatatgtcaaactttttcattatcattatcactgtatctgtgatcagtgatctttgatgttactattgtaattattttggggcactacaatctgtgcctatgtaagaaagggaacttaataaattgtgtgtgtgtgttctgagtgctctgccaaccagctgttatctccacccccttccttaagtctccctgttccctgagacacgatattgaaattaggccaattaatgaccctacaatggcctctaagtattcaagtgaaaggaagagttgcacgtctctcactttaaataaaaaactagaatgattaagcttcgtgaggaaggtatgttgaaagccaagacaggcagaaagctagtcctcttgtgccaaatagccaaattgtgaatgcaaagaaacagtttttgaaggaaattaaaagtgctacttcagtgaacacatgaatgacaagaaagtgaaacaactttcttgccgatgcagagagtcttagtggtctgggtagaagatcaaaccagccacaacattctcttaagccagagcctaatccagagcaagactctaactcttctattctgtgaaggctgagagaggtgaggaagctgcagaagaatagtttgaaactagcagaagttggttcatgagatttaaggaaagaagctatttccataacataaaagtgcaaggtgaagcagcaagtgctgatggagaagctgcagtaagttatcgagatctagtgaagatcattgatgaaggtggctacgctaaacaacagattgtcaatggagactaaacaaccttctgttggaagaagatgccatctaggactttcatagctagagagaagtcagtgtctggtttcaaagcttcaaaaaggatgggctcattactcattaggggctgatgcagctggtgacttaagttgaagccagtgctcatttatgttccaaaaatcctcaggcccttaagaattatgctaattcactctgcctggagccctagaaatggaacaacaaagcatgaatggcagcacatctgtttacagcatggtttactaagtactttaagcccactgttgagacctactgctagaataaaagattctttgcaaaatactattgctcattgacaatgcacctgattgcccaggagatgtggtgtacatgtacaaggagatgaatgttgttttcatgcctggtaacacaatatccattctgtagcctatggatcaaggagtcattttgactttcaagtcttattatttaagaaacatattttataaggctatagctgccatagtgattcctctgttggatctggacaaagtaaattgaaaaccttctggaaaggatcaccactctagataccataaagaacattcatgatgcatgtgagagatcaaaatatcaacatttacaggagtttggaagaagtaaattccagccctcatggatgactttgaggggttcaggacattagtggaggaagtcactgcagatgtggtggaacaagcaagagaattagaagtggagcctgaagatgtgactgaattgctgcaacctcaggataaaacttgaagggataaggagttgctttttatacatgaacaaaaaaagtcatttcttgaaatggaatctactccttgtgaagatgctggaatattgttgaaatgagaaacttagttgatcaagcagtggcaggatttgagaggattcactccaattttgaaagaagttctagtgtgggtaaaatactgtcaaacagcatcacacattacagagaaaccttttctgaaagtaagagtcaatcagtatgacagacttcattgtcttattttaagaaattgccacagcaccttaattttcaggaactaccaccctgaacagttagcagtcatcaatatcaaggcaagaccatccaccaacaaaaagattatgactcactagaaatacccagtgtagatgacggttgatgggtgcagcaaaccactgtggcacgtgttatacctgtgtaacaaacctgcacgttcttctgcacatgtatcccagaacttaaagtataattttaaaaaaagtttaaaaaaagattatgactcagtaaaccctcagatgatcattagcatttgtagcaataaagtcttaaattaaggtgtgtacattgtttaatggacgtaatgctactacacacttaataaactacagtatcgctaaaacataactttaatatgcactgggaaacccacaagtttgtgagactcacttgattgtgatatttgctttattgtgatgctccagagccgagcccacagtatctctgaggtatgcctataatagctaagtaaatgtcttaatctgtcactagtactgcttatatgcaaaataatatgactttaattataaattaatctattatgaatcatgcctcaaggaactctgagacagtgattctgtgttttaaatagcaggataactgctttattggaacaaaaatctcttttctaatttgatttggccaatcatattgattagtgagattttatgacaatcattgattcgtaagattgattagtgagattctattacacttctttttctgttgtgactggatgcaaattgggcagaattatattcagatttttaactgaggcatttttattgacagcaattgaacctggccatgattaactatgttttggtcgtctatggacttgccatttctctccttggaataggacagcctgaggtaagatttgtaacagtggtaataaacaattaaaatgatattgacatatcttataaaaattattttctcatttttacccattttcttctctgtaccttctgataattttgtctgaaatatctcagtttaatttagtttgtgtttttaaagaatatttagtttcctattagaaaaaggctttgccaggcaatcagtgggaatctactttttatttgtgtaaaaattagtatgtaatgtatcatgattgatagatttcagaaacataatcttgagggaaaggcaagttggaggacataaacattgtgatcccacttatatactttttggaaaacatacataacagtactatatactgtttatgaattctgtgcatcttgtaaaaaagtgaaaaaatatggattatgtttatataaaatttaagataatggctgcctttagtgatggccaggagggaatggacctggggaggtttcgtgttatgctgttttcctagaaaaacaaaggtaacaatgataacgttagtatctcttatttgtacgtagaaagtacttggatattgtattatttctagattgcaggcttcctataactgcatgtagtcagtgtatagacatgagctcccaggatttccattagtcatgctcctgcctggctctcctggaatgtttacctacctatactgtttggcattataactttgctttctgaggttttgagtttgctataaatgttgaaatgctctagaattacctcaagtataatatataatttggtctctatttttccctgtctagatgaaggtttaactctaacttgccacctagtgaggatctaagtagtcttttacgttctgttctctcccagaagttgacagtgcccaagattcattttccttgatctcagtgtcacagattaataatgtctcccatgaatgctctctaattctattttccaagagacagttggagacagaacttcatgattttcattttattcctgacagaataataataaataccatattttaccttattagaattgaagaaatcatttattacatttgtgatttaatgtaaaatagcgagactgatttagaaaaaaaaaatgtgttatagtagaacttacatgtttaaaagaatttcatcagaggacagcccttgcttcaaacgtttttagaatgcctcctttggaactggcctcaaagctccattttgtagtgacatttctttttttcactcacagtagggttaccagtatttcttagaactatgtatcttttggatgttttccaaaaacaaaattcattcaacttagtggtttttcactgttgagaatattcaaaaaagaatgtactctaagctatgttaagtgtttactaatgggctgtttttaagacagagctttcatccgtcttgtgccacaaaagactgtgacaacgtcattggaatggcattccttccaagggattagcacttaataggatctatgttatggtgtgtttacaccataattagccttttttaaaaaacaaaaacaaaaacacgatttgactctttttagtattagccagcacacgccaggcccttagtgcgtactagtaaatgcttataggttgattgtctgatgtgttcagcaggattggtttggttgtgtctctgactatccatatgatcagaaatttatataattcctaagaaagtgaaacacagaggtataattttgccacaggaatttggggatatgcagttgttattttaatattataaaaaaaatcaacctttagataaaatttatttcagtatttctctttgtatgtaagtgatcattgttttcactgctattcaaggaattatctgaagccgaaaaccagtttaagaggattattgaacactaccccagtgagggccttgattgcttggcctactgtggaattggaaaagtatatttgaaaaaaaacaggttagtagaaatgacactactttaagctctaggctggtaactcatttaaaatccaatgtgataatgatccattttctagaattattttgatatctcctctgtagcacactatcataattgtgatttactttgaggacctgaaatttcactatcagtattaattgttaaagcaaggccagtcattgcagttcttggtacttcctgattttaaatctaataagtcaacaatatagtaatttgacattaaagatttaatagtctagtgtataatcatctatagatagtgagtgaattgatataaactaatgtttttaaaatctgattgtttaatttttttgatttaattattttttaaaaatctgtatgaagatggttttaaataagaggtatatatgtgttcaaagacatcatgagtgagttaggaatataaaagtctgtcctctgaactctattgtagttgtaatccttacctgcagtttaatattgaagctgttctctaaatgcctcatgtctcttagtcttgtctccccgaatgtcagtatgtccctgaggggacaggattatgtcttgagctttaaaaaaagaaaatctgtttctgccacttgtacccaatatagaggtaggtatgttagattataaagaaataattgttgactgattgaatattatttataatttctaactgtctttaaattttcatgtaacttgttaggggaaattttatgagattttggggaatcccccccccagccatcttagaatgtgcctagaacctcctttatagttttttttaaattaaagaaagtttttttttggccaggcacagtggcgcacacctggaatcccagcactttgggaggccagtgggtgaatcacttgaggtcaggagtttgagaccagcctgaccaatatgttgaaaccctgtctgtactaaaaatacaaaaattagctgggtgtggtggtgcgtgcctgtagttccagctactcaggaggctgaggcagaaagaatcacttgaacccaggaggcggaggttgcagtgagctgagattgcaccactgtactccagcctgggcgacagagtgagactccatctcaaaaacagcaataacacagagacacaacaaaaaaagagaattttagacaatatccctgatgaacatccatgcaaaaatccttaataaaatactggcaaaccgaatccagcagcacatcaaaaagcttatccaccatgatcaagtgggcttcatccctgggatgcaaggctggttcaacatacacaaatcaataaatgtaatccagcatataaacagaaccaaagacaaaaaccgcatgattatctcaatagatgcagagaaggcctttgacaaaattcaacagcccttcatgctaaaactctcaataaattaggtattgatgggacgtatctcaaaataataaaagctatttatgacaaacccacagccagtatcatactgaatggacgaaaactggaagcatttcctttgaaaactggcacaagatagggatgccctctctcaccactcctattcaacatagtgtcggaagttctggccagggcaatcaggcaggggaaagaaagaaagggtattcaattaggaaaagaggaagtcaaattgtccctgtttgcagatgacatgattgtatatctagaaaaccccatcgtctcagcccaaaatcttcttaagctgataagcaacttcagcaaagtcccaggatacaaaatcaatgtgcaaaaatcacaagcattcttatacaccagtaacagacaaacagagagccaaatcatgagtgaactcccattcacagttgcttcaaagagaatacctaggaatccaacttacaagggatgtgaaggacctcttcagggagaactacaaaccactgctcaatgaaataaaagaggatacaaacaaatggaagaacattccatgctcatggataggaagaatcaatatcgtgaaaatggccatattgccaaggtaatttatagattcaatgccatccccatcaagctaccaatgactttcttcacagaattggaaaaaactactttaaagttcatatggaaccaaaaaagagcccgcattgccaagtcaatcctaagccaaaagaataaagctggaggcatcacgctacctgacttcaaactatactacaaggctgcagtaaccaaaacagcatgttactggtaccaaaacagagatatagaccaatggaacagaacagagccctcagaaataataccacacatctacaactatctgatctttgacaaacctgacaaaaacaagaaataggcaaaggattcactattcaacaaatggtgctgggaaaactggctagccatatgtagaaagctgaaactggatctcttccttgcaccttgtacaaaaattaattcaagatggattaaagacttcaatgtttgacctaaaaccataaaaaccctagaagaaaacctaggcattaccattcaggacataggcatgggtaaggacttcatgtctaaaacaccaaaagcaatggcaacaaaagccaaaattgacaaatgggatctaattaaactaaagagcttctgcacagcaaaagaaactaccatcagagtgaacaggcaacctacagaatgggagaaaatttttgcaatctactcatctgacgaagggctaatatccagaatctacaaagaactcaaacaaatttacaagaaaaaaacaaccccatcaaaaagtgggcaaaggatatgaacagacacttctcaaaagaagacatttatgcagccaacagacacatgaaaaaatgctcatcatcactggccatcagagaaatgcaaatcaaaaccacaatgagataccgtctcacaccagttagaatggcgatcattaaaaagtcaagaaacaacaggtgctggagaggatgtggagaaataggaacacttttacactgttggtgggactgtaaactagttcaaccattgtggaagtcagtgtggcgattcctcagggatctcgaactagaaataccatttgacccagccatcccattactcggtatatacccaaaggattataaatcatgctgctataaagacacatgcacacatatgtttattgcggcactattcacaatagcaaagacttggaaccaacccaaatgtccctcagtgatagactggattaagaaaatgtggcacatatacaccatggaatactaagcagccataaaaaaggatgagttcatgtcctttgtagggacatggatgaagctggaaaccatcattctcagcaaactgttgcagggacaaaaaaccaaacaccgcatgttctcactcgtaggtgggaattgaacaatgagaacacatggacacaggaaggggaacatcacacactggggcctgttgtgaggtggggggaggggagagggatagcattaggagatatacctaaggtaaaggaccagttaatgggtgcagcacagcaacatggcacatgtatacctatgtaacaaacctgcacgttgtgcacatgtaccctagaacttaaagtataataaaaaaaatatatatatataaacaacaaacaacaaaaaagtgtacacctgccacaataaagccagtgtccaagacgagttgtgtttaatgtatattacttttatagcaaacagcaatagtgactttgtttttttaaagaaaatttaggttacattgaatattgctgttcagtgattcatcaaatgtattcgtcccagtaagcttgagatctttggtgacttttgaagggagtgaaaataccattttacatctttaatgcctttttcataattatgactttagatttctagaagctctcaatcactttgagaaagcaagaaccttgatttatcgtcttcctggagtgttaacttggcccacgagtaatgtgattattgaagagtctcagccacaaaaaataaaggtaaccatttatttttgcagagtgtttcttactgtgaatgcttatctgcattgactgactcaggtatcaggaggcggagaggtaggagcattccatccccacctcccttacacgcatttcccctctactgtctaatgagaatctctgacatttattgaatgttttctgtgtgccagtgtgtaccttcatttatcattatgcttaatccttatagcagccccgtgcaggggggcactgtgatcattcccattttacagatgaggaaggttaagtttagagaggtgaaatgatgcactcaaggtgaaacagcaagcaaattgtggtcctggaacttgagtccaggcattctgacttctgagtatgcatgatcatgcactctgctggacttggttgtacttagaggaaggtatagtattgttgtttcatcataaagttaccacagttactgagatggtacttgaagatttagaaaaatatgaatttagtctcatatccagaagcataaagatgctttgcttgttctagaaagacttacgtgtgaaatgactgagataggcttttacttgtagtgaactctcacatgtactcagaacttgattttggctgaagcttttaaaatcacagaagtcaacttttacaactcaataataaaaagacaaataatctaagaagtagtcaaaggatctgaatagacatttctgcaacgaagatatacaaatggccaaaattagcacatgaaaagacattcagcatcattagctatcagagaaacacaaatcaaaaccacagtgagataccacttcacactcattaggatgtgggcagacaataaatattggcaagggtgtagaaaaatgggaacattcagacactgctggtggtaatgtataatgatgcagctgctttggaaaatagtctggcagttcctcaaacagttaaacatagagttaccatgtctcagtccatttgtgttgctataaagaagtacctgagactggtgatttatgaagaaaagttggcttatggttttgcaggctgtataagaagcatggtgtcagcacctgctggtgaaggccttcaatagctcctactcatgtcagaaggcgtaggagagcctgtctgtagagatcatatagtgagagacagggaagtgccaggctctttttaacaaccaactctttagggaactaatggagtgagaactcactcaccccagggagggaattaatctgttcatgagagattcgtcgccatgactcaaaacacctcccactgtgcctcacctccaacaccggggatcagatttcaatgtgtggtttggagggtcaaacattcaaactgtagcataccatatgatccagcagtttcactcctaggtgtgtacagagaaaggaaaacatgttctcacaaaaacttgtacatgaatgttcatagcagcattagtcataatagcccaaaatgggaaatagcccaagtattcgtgagctgataaatgggtacgtaagtattggaacctgggaggttgaggctgcagtgagccttgattgtgccactgcagtgcagcctgggcaacagagtgagagtctgcctcaaaaacaaatggccagtcttggtggcttacgcctgtaatcctaccactttgggaggccaaggcaggaggattgcttgagctcaggagttcaagaccagcctgggcaacatggcgaaacccatcaatacaaaaattagccaaacatagtggcacatgcctgtagtcccagctactcaggaggctgaggtggaagggtcagttgagcccaggaggcagaggttgcagtgagctgagatcgtgccactgcactccagcctgagtgacagagtgagacgctgtctcaaaaaaaaaaaagagtactgataacatgctgcagcatggatggaccttggaaacattatgctaagtaaaagaagccaaacacaaagggcttgtgtgagtccattcctatgaaatctccagaataagcaagtctgtatatagtgacagaaagtagaccagtgattgctgggcctggaaggttaggggaaaatgaggagggactgctaatgcgtatggagtttctttttgaaaatgttctaaatttagaccgtggtgatgtcagcacatcctgtgaatatgctaagaacaccgaaccgtacacttcatttgagttgtatagtgtgtaaattatgtctcaacaaagctattataaaaaatacaacacagggattcttggatttacctctcttcatacaagattgggatagaggcataggagctattgataacaaaaagccagcactggaagcatggcatgagtctcttgggggcttcattagcagtggaataattctccagggagtccacaaacaacagtggcagagctgcaaggaggaagataatgggagtgttaggattctggatgaggtgatgttgggcaagaggagcctggtaaagtcctcaggattaccctaagggttattctgccttacttgacttcctcttaatgcttatggaagatttctgagagctgtaaattataaaatgcgatttgatgattgtaacaggacaaaattttgattctttcgaaattctgaaaaaaaattttgtccagtcctctttttaaatctctcttatgtctcttatcagccttccttttaaaaggaaaaactttaaaagttgtatgtagtttgttgttggtgaaaaaatttagtcattcttatgctgaaaatattttgatggcaagaggttattgaaatcacaagcatttttattgacagattagtattgtaatggtatcatttttgtttattttgttttagatgctgttagagaaatttgttgaagaatgcaagttccctccagtgccagatgccatttgttgctatcagaagtgccatggatattctaagatccagatatacataactgatccagactttaaggtaaataatgagtgtacagtgggacattaacttgcaaaatcatttcttaaaatgggctcaaaacaatctgtaattggaggcacccaagttctctggctagttagcagtcgtccacccctttcccaggattttttttttttttttgagataagtctcactctgtcacccaggctggagtgcagtggcacgatcttggctcactgcaacctccgcctcctgggttcaagcaattctcctgcctcagcctcccaagtagctgggattacaggcgtgtcccagcacgcccagctaatttttgcatttttagtagagacagggtttcaccatattggccaggatggtctcgatctcttgacttcgtgatccaccccctcagcctcccaaagtgtgggattacaggtatgaaccaccacgcccagccttcctggacttttttaggtctacatcgtctcacatgggaaccagagccactgatgtataaacgctctgggctggggtagtgacctgagaaggcaggctggctcattctttttcctcttcaagctaccttaggaggataggaaacaaagtgagattgttacctctgatttgttgcaattctgatctctcataaaatttgagtcccaaatctaaaggtcattgtgatcattgaattagctgttagagacctaaatttgagataagtctggcacttaattgagttatactggtttattcaagaagctagtagctgcccttgtcctgctgttccaatgtccctggttagtaaatcagatgaaataatgtttataaaatatttgatatattttgaagaatgatgcaactttatgctgtggaaataaatatgttagtcaagctctctctgtctttatgtatgttgtagtgagtgagtgtgcagagacatctttaaaacgttaattaaaaaattttttgtaaccctagggttttatacgcatcagctgttgccagtactgtaaaatagaatttcacatgaattgctggaagaagttaaaaactacaacctttaatgataaaattgacaaggtaaagcataacaggattgtctgaatttttcagtatacttattgtatgtcaatttttcccccaagaattccttcctgaacattctgcacataattagaaaattttaaattataactttaataataaagtggaaaatcaaatttgtttttatttggacaatcataaaggcattaaccatagaggctttgtttttttaaagagacggatctcactgtgttgcccaggctagagtgcagtggtgcagtcgtagctcactgcagcctcagactccttgacccaagtgatcctacttcagcctcccaaagtgctgggattataggcatgagccactgcaccaggccccacttgaaagttttgatgtggaattagggatttcaaaaccaaaatttgatgaggtaatttgtactaagaagtcaactcaaaacaatttttttaatgttgggaagaaagatcaacttcaattttaaactgccatttctctccagggattttcttattaccaagataatgatgttaattaccattaagtagacatactttgagggaagtcatagtattacaatcttatttgtattcatagaatttgtttctgatctatagaaactatggaccttttcctacacttcttaggcttatgcagaccactgttcttattggggaaagaatgaggcagttgtactaggcatctgttaacaatagcaattattaaagtatggtagaaataaattctcacattttgtacattttcacataattaattaacaatataatgatatgagtaaataactgtcacctttgagtcacttctgctatgtctttgtcttacctaaattgagtttctctagtgatataccctcttttagtggtcttaactattcccatcattttaaatacactctgtaaattagtcagctttccctaggatatgctgaagtgatgcaacccaaatatcttgtggcatacatcagagaagtttgttttttgcttacatgacttgtcctgcagttctgcagttgttggctgggactgggctgtagcagctttattttgtgtggctctattccttgtttctcaatctaagttgaagaatgacccttttctggaacatcttcctgtgtcagaggaaaaagaacaatgtccagtctatgaagtgtttgttaaaccttttgtctagacatgtgtatgtcatgtctggtcactttgcattgatgaaaacaagtcacatggtcagacccacacctgaaagtatatttttcctacacggaagccttaaaattcgcatggcagtgagtaaggattttcaccacttgcctgaagatggttttagtccgtattttgactgttcctagtggtaaaaatagtatacgtgtatagatttatcccccctagacataacatttttcttgttttttttttttttaatcaaataggattttctacaaggaatatgtcttacccctgactgtgaaggtgtcatttctaagattatcatcttcagcagtggtggtgaagttaaatgtgaagtaagtaataaaggggaaaccttgttagatagataaccaaaatgtttacaccttttgaaacatgatttgaatttgtagatatcatgtaatttggatcttttccaggaaagaaacaattacttcatttaagaaaatataggaaatactgggatgtgagaatgcttcattgtaatgaaagcattcttatattcttttatttcttaataggaaaaggaggctttttatatcttagttttactatttttactgtttttgataacttcattttcttaatcccggtaaacttttgggcagtagtgggtgtgcaggtttttagggagggggaagagcgtcttgagggattacctttaacttcatgacatgggaatggcaagagtgggtagttgtaataatatttacactttattagatcgtctgcttactcttaattttttaaaaactttttcctcaagtgtgtctaccctcttgttcctcttcagtaaattattttgctaaagctttctgggcttttgtctgggtcagaacatcatcactgttctctatcaaactgaacattatgtgtgcttctgaaatacttgttacttgtggttttgtgttttatgtcatgggagtatgagacaaattttggatgtctttgttttatttaaagtttgaacacaaggtcataaaagaaaaggttcctccaagacctattctgaaacagaaatgttctaggtaagatttttaacaatcaatcagtggtttgatgatgtctcttagaatataattctattaaatgcagatttctaaattatgcctttttaaaaattggctgtgtatacatatattcaaataagtgttttttaaaatgatttttatggaaaattaaaacttaaagagaactagcctagaatgattaaatactaaaaacttgattcagaattatttatctagtggttgaatttacaattaaaattataacatttgatgctgtgaaattacatgtttgattaatagatttggcatttatataaaaactatacagtttgctctcagttgttgaaactttaattccaaaagcatatttttctttttatctctcttcagtaaacattttgaacctatgactattttttaccctgaaatactcaatgtactgtctaaattattacttctctatagctttttgtttagatcaaataattcagattcttttttcttttctttttggtcctgcttcttgtttttctttctaagaagtgatttttttttatcatttgtgaccaagaaaaagcaaaagaaaagatgaacagaattatttgttggagagaattcattgtaaccagatcaaccaaattatagtgttgtgggttattattgagatgtgaaaattatattttactatgggacctttcttagaaatgagagtttacatgaattattttgcagagtaatttgtactatttctgtttaccctatgaagtaacttagatacatgaaagtgacatctatacaatctgtagactgcatccttagacatcacctaatcattgaggtttttgttttcatgaaacaagtacccttattttgacaatactgacagtttcttacattgaatggaagatgtaggccgggctctgattaaaaaaggaaaacttctaatatattgcttggaagatggtttctacgatagtcaaaggaaaacagttcattgagttgtcactaattgtaaatgtttatcagcctagagaaactaagactgaaagaagacaaaaaattgaagagaaagatccaaaaaaaagaagcaaaaaagttagcacaagaaagaatggaggaggacttaagagaaagtaatccacccaaaaatgaagagcagaaaggtatgcagaagccaaaggcatgataagaataatatactctcatttaaatgtataaatgtaagcatcttttgggccttatattcatcattattgaattgaaataaagatttcacttagtaatttaatactatcactgtcttctgttactcgaagacagaattgggttggtgtaaagaacactgaaaaacctttcagagattgtattcccactgaaaaacctttcagagattgtattttaactttctgtgcttaatgactaaacatatttattgtatataaagttaaggtagttgatgaggctgggttaggattgttgaaggaagtggccgtattttaggggaactaagttgttttttttttttgttttttttttttgagacggagtctcactctgttgcccaggctggagtgcagtggcgcgatctcggctcactgcaagctccgcctcccgggttcacgccattctcctgcctcagcctccccagtagctggaactacaggtgcccgccaccatgcccagctaattttttgtatttttagtagagatggggtttcaccgtgttagccaggatggtctcgatctcctgatccaccctcctcggcctcccaaagtgctgggattacaggcatgagccaccacgcctggcctagaggaactaagtttcaaatgctactacatgaatggttcagaatgaagggtgtaaaatgcttacttttggtatgtttattttagcgtacactttcatgtcttttcaaaagtattgttaagtgtttatatttctaattaaagtttcttgagtttagtaaaacagtataatcaatctgaatcatattttatattatgtaattttgttatttctaagtttatgtaattgtgaattagtcctatttatcactttaaccattgttatttatccttagaaactgtagacaatgttcagcgttgtcagttccttgatgacagaattctacagtgtataaagcagtatgctgacaagattaaatccggcatacagaatacagccatgcttctcaaagaattgctttcttggaaagttttgagcacagaagactatacaacctgtttttctagcagaaattttctaaatgaagcagtggactatgttattcgccacttgattcaagaaaataacagagtaaagacaagaatatttctgcatgttttgagtgagcttaaagaagtggagcccaaattagccgcctggatccaaaaacttaatagctttggtatgtccctttatattccagagcaataaactttaatacgaaggggaagtgtaggtctctgagtcattttcattttcctgccatataatttataactttaaatgcaggactataaatttgtatggttaagaatacttttccagtcccagctacttgggaggcggaggcaggatgattgcttaatctcaggaatttgagaccaacctggcaatgttgcaagacctgtctctaaaagaattttttaaaaaaagaactaaatatatgaaggcctttaaaaaacagaaaaactattacacacacacgcacaccacaatttttaggttattttatagataggttacagtatacttcttcaaaaggtgcaatctaaggaaagaccagtcagtaaagaaatccagacctatattagactaaactatttgtaaatgtgtagatgtgtgaatactaggcacaaccatggtaaataacacatcctggagtctgccccctgctcaggagctgtgttgagaagacaaatctataattcagattctttgaagaaaaatttagaggcaagagtggatgagactaattgctcagggtcacctaaggcaaatctgtatctagagattaagaggaacatatcctagggttggactgagctgtggtaaatcacaggattatataactctgtactgtgttctgactttcgtaacttggctgggagaagggaagagtgagcaagccccctgccctcccctaaagcaggcgctttgcctaaagccatgcaggactgcagaaggcagctgcagatacagttgttgtgtaacacgaggtagggatgctttgggcacctaccagggcactatttatcttgctgactggatagcaactggcctagcacaatagttcattcagtcggcagctattagataagaggctaaagtacgccacgggaaaaaggcagggcctttagccgcagaccacagagtgaggcctgctaagcctctgccagccgtccccacctgtctgaatgtttagaaacgtggggctattagaattctagggtttcagagaagatactggtcagcttctgccagaagagacgatgtaagatggcagcaagcctggcatagttagacagctgaacatgcctgctttgaacatagatcctcatggatttgtgatcccggaaagttatttttaagtgacaagattgtcactagtgagtatcaagtaagcaaattataaagttaatgcttgctttaacatgctttaggagatactcaggactggagaaataggtttgcctgggttatgctacacggtcaagactgccagccactgttcattcaggtaaatgcagcacttgagccctccagctcactggcaggaaagggtgaacatgtcttttgatataaaccatgtgttttttttgtttgtttgtttgtttttttgagacagagtgtcgctctgttgcccaggctggagtgcagcggcgcgatctcggctcactgcaagctccgcctcccgggttcacgccattctcctgcctcagcctcccgagcagctggtactacaggtgcctgccaccacgcctggctaatgttttgtatttttagtagagacggggtttcaccgtgttagccaggatggtcttgatctcctgacctcgtgatctgcccacctcggcctcctaaagtgctgggattacaggcgtcagccaccgcgcccggtcgatataatccatgtttattctgtagattaaaggtatcattttaataaggatatatgtatactatttaaagtagcaatttttatttaaagttgtgaaatgagttcaagcatgttaattagtaaggctgttactacagtcctgaagtaaaatgcacacttacttaaatagtaagtaaagcagttttcatttcctggaattttcttcaataaaacgactattgggtggacttacatcatgcacatatttaccataagagaggtccagtttttatgttcagcaaaagatgaagggaggaaaggaggaaaggagggagggagagagagaaataatagagcactagtgagataaatttaacatcccaatagtgaacactgcctgcctgcattcccctcactgaccacaagctctgacgtggatagggaacgggaatgtgctattttttcattgggctctcataaatcttttattgtgtgagtattctacatggtcccttattctggtgtttaaagatcctaattttcctgcaacatgatctctgcaagctaactctttaatccagaagcaagcagtctaggataattttgactctgagcaatctctgcttcatttgttgacttcatttgttgactaaggccctcggaagaagtgaccgttttatattagaggcatgatggagaaactggacagagctcctttttgctggctgttcatcaggagtggggcttcaccgtcatttcagtaggagtctgtatgagattgtagtcacctgttttctaatttggagagtggagaataaaagtaggcatactgaccaccttgatttttgtagagaggggtgaggacccacattttggggaataaggaatgttattttaggtgttggggaatgggtttacccatttcctcttttagacacatttgggaagattctgcatattgttgatgttttattactatggaatccatataaagaatcataaaatcttgctagtttatactaattggaatgaaagtctttatgaattagtgaaaacattgtttgggtttgtttttttttttagagatagggtcttgccccatcacccaggctggagtgcagtggcgccgtcatagctcactgtagctttgaagtcctgggctcaagcagtacccccacctcagcctcccaagtagctgggactacaggcatttaccaccatgcctggctaactctttttttttttgtaaagataggggtcttgctatgttgccagggctggtattgaactcctggctcaagtgatcttccagccttgtcctcccaaagtgctggggttacgggcctaagccaccatacctggcctcattgttatatttttaaaggaatttaatgctatactttcatctcctaggtctaataaaggtaactatgatagtagaaggctttggcccacattattcaaatctaatagacaagaattattataattagcctaacaatgttaaatggtgtttctaaaatgcccaatagcttgaacgaatctgttctcaactatttaaatgtttttgctgagaatataagcaaactataatcagctgctttcagagatgtgaaactaaatgtgattttacagtaaataatttccctcctcttctgatttgggttttgtttttattacaggcttagatgccacaggaactttcttttctcgttatggagcatctcttaaactgcttgattttagtatcatgactttcctctggaatgagaaatatggtcacaaactagactctatagaaggaaagcaacttgattatttctctgagccagcatcattgaaggaagcccgttgtttaatatggctgctagaagaacacagagacaagttcccagcattgcatagtgctttagatgaattctttgatataatgggtatgtggactgagtttagacttatattacatttaatcttaagggggaaaaaatctgtgaaggacctagcttgtttaaatatataacaaagaaaatagtgaaaattattatggtacaatcagtttatgtggggaagttagtgattaacagtagcaatttttttatatcatgaagcttttttactttatcagttaaagagatactcaaatgtaggtatgttatgctaacaatacacaatgttcttcccgtcttagatattttcacagcatcatgggaaagattgcatgttacactgacagaatctattagtaagtggtttgatttatagcattttagaaaacattggtctgcagaagtaggtgatgtttgcagaatctagaatggatagcattctaggatgttttaatgggaagagcctagaactgggggtcaggaaaagtaggttgtggcacagcttcttccttagtttggttcattaaaaaccctgtgggcccagtgatgggtgttgagaaggaattcagaaatgcttacacttgtctctgcccttgaggaccttgtgttctagaaaagagaataagaagcatgcactaataacagtaacatggtagtaaactcaatacgggagggccagagaaggtgccaagggcatcaaaggaaggacccaacactttctttctccctgggagagaggaaagctgtggtgcaggggtagagtctcagatgggctgtgaacgtgaaagtggaattagaaagctgggtgtcagggcttatttggaattggggaccctatttgggtaatggcatggagtccagcttgaactaactagctagctagcagctaattccttcttttctcttagatcttaatttcctcacattaaaatgagatgatttggaggcagtgacatgtgtggtcctgttttacttaaaaattataatattcctagattctaaatgataatttcttacctttcatactatatgaacatattatgataatccccaagtccctcagaatcagaagtctcctttatgtgttgttaggagttagacttttaaatgtcatgctgtttgttttaaagggtacattaaaaggtctggccttgtacgatggtgtcacagatgataaagttccaatgcatataaggagtggaaagcttacttttgacaacaaaagttcttagaaaagagcacactcaaatacagatggctttatcttttcaggatactgcttcatgactgaaggtgacatgctacttgatagcctgaatttattgccatcagtttgctgctgctggtaataaaatgctgtcccgggactgagcttacaaaacctgatgcatgtttggatcacaaaacaagacaactaaaaaggacacaattccctctcagcatacactcgtcctttaacttgtgttctctacatataatacacagcacttccagctgccactgtttctctgtttctagtcatgaggtcagaagccactaaccaaattattggcaatcccaatggattctcaagtgcagtagctctgccttccaccttcaccccaaacattttcagttttatctcttcatttaaaagaatagttatatttcttaaaacttttcaaaatctactgatcttgtagatcagagtgtttgacaatgtcatgagtgctttgataattgagagccccgactttttccctgacctcttcatgcatgatcccctagggtatttctgtgagacagccaaatagccccttaaagcagtatgactgaacccacctatcacatcttcagagatctgtttttcctcaatttatctcagtcaataatattgtatatctagtatttaaacaggaaactctgtaattagtctcaattctttcttttcagtattaagagtataacttgtttgtcatcaatccaaatgagctttgtccttgatctgtcctttgctgtccaccccacttcccgaggccaagaccttagttgtctttccacagttagaccactatagtagcctccaaactggactccatgcctctagaatctcccattttccgtcttcctcttatattgcagctagtgactcttctagaacatctgtctaacattctgttaactattcaatttgggaaacatttgtttagttttaattgcagattaagttcacatcatctggggtctgggttcatcatcatcctctatctctgagcacacaccccactactgactgtgcccaaacctgccttgtgctttcctgcctcctgtcttcactcacgtagttcccccagccatgccccacccctttgcttgttcatttcaagagtaacttaaatgtcccctctacctcagagcttctttgcccctcctgtgggcctctcccttgcagacttcagacttgagtccttcgtgagcctttgttgccttgtgtttcacgtggtccttagcacgctgggttacaggagtttgtctgtttgtctttctggcagtagaacaggagttcatcaatggtagggactgtcttgtgcatctctattcccaggactagcatagatggtacctagaaggcactcaacattatgctgaatcagattgaagttttatggttctttgtagttggtttcccgtttagtcagccattttgcccttggtttctaaactacacttgtgtcaaagccaaataaggaatagaacatggcctatgccagtagtatgaggagttattttaaggctttagtgtactatatggaaatgtaaatatttagttttctcacaaaaccatctgtatattcctacagacagccgctgtactgtgttaaggaaacaagatagtggtgaagcaccggtaagttacttggatcacttgaatcttacgttctaatctgatgttaaaccaaggatgagaaggggacccaggccagtgtttattgacatcacagccagcattcaagaaccacattaaaaggacgtctgggtagtacgtactattattcattagaaagtcactgccagttttcctctcggaattggagcaataatcagcaaactatgaggcttaaattagacaatttctataaagtttcagagctgataaacattaatattctaattaagaaaggaagagttcttcatctcctggcataaaaatgaaaagttgtctttaataactaaacttctaatgttctgctctagaaggaaaacaaagggactttgttttgagtggctctaaattacgtttaagttaaaacagttccagagttgtcttccttagtagtttgcagttgccttttattcattcttcagaaattcttcagtttaggaaagtgagtaaatagagaaaagcacaacattgtggcagttttcaaagagaaaaatgcctgtttactgattttcaggagcaaatcatctatctatatgaaattttgtcttaatctgctccatcaaatattgcccagctaagcagggaaacacagctgaaatactccataaggagctgaaggcttctttattcactgtttgtgccccagtgtctggtcaggtgcagaatgtctagtttggcttagtaaaagaaatatattaataataaatttactattatggcatctaactggaattacttaaaagtctgattaattacttgaaataacagtccaaccctgtggaaaataagataaaaatgttggaacaacttaattttagtatacattagtattattaaattttgtttgttttctattataaatcgtagcacttgggctgatacactgtagtgttatttttgttaaacattttatgtacatttaacttatggctagtctgtaaaaactcatatggtttctttatgttgagcttcataatgctgttatttgagtgttcactgatttttccccccattttttagtttagttcaaccaaggtgaaaaacaaaagcaagaaaaagaagccaaaggattcaaaggtatggagtattttctgtattaattcttgtctaaactctccaaaatagttagttggacatatacattagaattgagcaattcttgggatattttgaaacatttgtagagaaagactttctaggacttaaagatgttttggcagtcttctacattttgaagaaattccaggttcatattatataatagcaagtcttgacactcgtattctttattgtcttttttatttttctaggtatttctgagtaaaaaaaaaaaattgtcataatgtcccaaaaaataaataagtctcaaaaaatagataacatatttaaactaaaaatgatgaatactaatcattatgacagtcccaggattgatagaatcccttccttcctctcaccaaaggctctcctccaagcccattagataagtagggcatttttatttttatttttgagacagggtctccttctctcacccaggctggagagcagtggtacagtgacggctcactgcagcctcaaactcccaggctcaagtgatcttcccacctcagcctcccgagtagccggaatgacaggcgcatgccaccatgcccagctaattttttgtattttttggagagatggggttttgctatattgcccaggctgttctagaactcctgcgttcaagcgatctgcctactttggccttacaggcgtgagccactgtgccagaagtagggcacaatttttaagtctttggtgggttcttcatggctcttgtgtgtatgtggggagcagaaagggggatggagtgagagagagtagcaaatcttcaaaggatgagaacagttaaggagttccaatacaacttttatttttatctttgactatgtatttagtttagataaaatgggagtttaaactgagtaacatttaaatttttttggagcattggaaactatcctaaatgttaatttgagcttatttttggctgttgaaacttttattactatgtgttcctgtttataagaaaatttggatagatcttatatatcagcaatttgtatgtgtgtttatataagtattcatcaattttaatgatttttctctttaatggaattttaaggtagaaaatcattgtcatttttctgtcttttaaaccagcctatgttagttgggtctggaacaacttcagtaacttcaaataatgagatcatcacttcaagtgaagaccataggtaagtataatttttaaatttttgcttcattttaactcaaatgtctttacttaataagttgtgttaatttaatatatataaacttgtgttttatttccctaactttcctttctaaagctgtgcatctgacaacctgatgtaattccatcttgattacatttatatagtgtggctagaaggcattaagaattcattcaaactgtgttaaagtcacgacactggtgacattcattcactaagtacatattgagaacctaccatgtgcaaggctctgtgggaaaatcatagaaaaatgtctagaaattattctttaaaatagtcaataaagagaatgtcctgttaatacttactaggcatttttgcctgtaagagaggaagctgttttgggagctgtatatgatgttatgttttcaccttatatattagtgattttcaatgccatctggttgtcaaaactgagttttcaataaacaaatatttaagaaataaaactagtgagtagcagtaacctttttatatcatactcctttatgaaccaaaaatgtacaacatggttttttttttctcatttcttaaaggagctatcagagcagttaaaaattacgtggtcatttcatggattctttaagtagggtaattgttttaagttaaaataatagcctgtcttagtcagtttgggctgctataacaatataccataaactgggaggcttacacacagaaatttatttctcacagttctggaggctgggaagtcccaagatcaaggtactggcagattcagtgtttggtgagggcctgctttctggttcatagatggtgcctttttgctgtgttttctcatggtggaagggacaaggcaactctctggggcctcttttataagggcaataagtccattcatgggggtagagcctaattacctcccaaagaatccacatcctaacaccatcacattggtgattaggtttcaacatatgagttttgcagaaacacaaacattcagaccatagcatagcctttactgagattaattcttatgtatcagacattgttttgggggtttacatacataaactctttcaatccacttatcctgcctaggaggtaagtgctattatattctgtccaatgtacagataaggaaactctgaggcacagtgcagagcgacttgcccaagaacacaaagcttataaatagcagagctgggatttaagtcatgcagcctggttttagagtccacactcaaactactacatctttttagagtgctaacatcttacatttaaaaaaaacttttgtttagatggagtttcgctcttgttgcccaggctggagcgcaatggcgtgatctcagctcactgcaacctccacttcttgggttcaagcaattctcctgcctcagcctcctgagtagctgggattacagccatgcgccatgacgcctggctaattttgtatttttattagggacggggtttttccatgttgatcaggctgatctcgaactcctgacctcaagtgatctgcctgccttggcctcccaaagtgctgggattacaggcgtgagccaccacacctggcttaaaaaaaaccttttattaataccatttaccagtctcagtctcactttaagttaatttatagcagttataatacaatcttcatttgtctttcagtcatttaacaagttataattaatgcaactttttttaaaaatatggagttttaagaattttgctctttggagcaagactaaataattgaaagtgcttacttagattgtcagatatgatatttctcgcctataactgtggaagggtaacttttctacactaagttccctggtgctatttttttgcaacatagagctgagtaatatattgccattattgtgtttatttcaattagacattcttctggttaaataataaaccaaaggtctatcatccacaaaattgggtgttttttgttgttatttaccagcaatcgaaattcagattctgcaggcccatttgcagtgcctgaccatcttcggcaagatgtagaagaattcgaagctctctatgaccaacacagtaacgaatatgttgtccgcaataagaagctatgggacatgaacccaaaacaaaaatgttcaactctatatgagtaagtgggttgaaatttttacaaccattattttatactaaggctgccaattaaagatcagaagttgtttaatttgtgcctgtttttagagattttgccacattttacacaaagttaatttaggattttttttttttttttgagacagagtcttgctgtgtcacacaggctggagtgcagtggtgcaatctctgctcactacaacctctgcctcccaggttcaggtgattgtcatgcgtcagcctcccgagtagctgggattacaggcttgcaccaccatgcctggctaatttttgtatttttagtagagaagggtttcaccatgttggccaggcaggtctccaactcctggcctcaagtgatctgcctgcctcagccttccaaaatggtgagattacaggcatgagccacctcgccccgccctgaggatttttaattattaaatttagagtcctaatgattattgattttgtcagtttgagctactaagtcgatactgagtggggtggataaaacaagtaaaaaattcaggaaaatctcagatagcttaccattttgagctttgtgttattagatagtgcatgaggccttccttttaagaaaataaatcaagggctgaggtctgtaatagagtattaatttaaaagccaactcttctcctggaagtcctgtcagtagcatatccaccatatggccctttcttctgttttcctgtattgcatcattcctatttagttctgtgctcttagatccttcttcatggtttttctttagagttgaaatgctgagcaaatcatatttccagagaactcttgggtgacagtgtggaaacaactgtaaaattatactattatttcttaaagtatgctagaatttgcttcaggcatccaaaagtaaagctaaagtatgtagttttcagtatttactgtacgcaaattcaaataggatttgtttttgagatttgattttctctttttatttaaaattcttattggcattattatctttcctgaataaattttttgttgttgtttttagaataaattatgtaattacatagttgaaagttatgaaataactttttgatttccttttgctttcccctgctcccagaaaagttttaaatgatcattttctaggaggtagacaaaattttctttatagtatcattgattgcagttaaccttatgtttgttatatttgttgttgaggaaaggttgagatcagtgaaaagtgaaacagtgttttcctttgggagaataaaagtttttttcaaatagacatattcaagtacttccttatagtaactcatgtaaatgtaaattttttccaagttacttctctcagtttttggaggaacatggtcccttggacatgagtaacaagatgttctctgcagaatatgagtttttcccagaagaaactcgacagatactagaaaaagcaggaggtttaaaaccttttctcttgggatgccctcgttttgttgtgattgacaactgtattgcactgaagaaggttgcatcacggctcaagaaaaaaaggaagaagaaaaacattaaaacaaaagtagaagaaatttcaaaagcaggggagtatgtacgagttaaactacaactgaatccagctgctagggaatttaaaccagatgtaaagtctaaaccagtgtcagattcatcttcagcaccagcttttgaaaatgtgaaacccaaacctgtgtctgcaaattctcccaagccagcttgtgaagatgtgaaggccaaaccagtatccgacaattcttctagacaagtttctgaggatgggcaacccaaaggggtctcttctaattctcctaaaccaggctctgaggatgcaaattacaagcgagtctcctgtaattcccccaaaccggttcttgaggatgtgaaaccaacttattgggctcaatcccatttggtcacaggatactgtacgtatcttcctttccagagatttgatatcacccagacaccgccagcatacataaacgtgttaccaggtttgccccagtacaccagcatatatacacccttggccagcctttctcctgaatatcagctaccaagatcagtaccagtggtgccgtcttttgtagccaatgacagagcagataaaaatgctgctgcctattttgagggtcatcatttgaatgctgagaatgttgctggtcaccagattgcctctgaaacacagatccttgagggctctttgggaatatctgtaaagtcacactgcagcacaggtgatgctcatacagtcctgagtgagtctaacagaaatgatgagcactgtggaaattctaacaacaaatgtgaagtaattccagaaagcaccagtgcagtaacaaacattccacacgtgcagatggttgccatacaggtaagagttaaatagaaaagtcttcttaatactgaagttaaattttccttttcatttttcattgccgttatatttgcaagaatccttaaagttgattgactttataatgattactgaagcttttgcctgaaaatacttttaaaatatgaactcttttgtgaggcatgacaggtaatcttctcagaaagaagcttgggtccaataaacaatacccatctttgctactgaaattctacacagattgagaaataagacagcaggtggagccaaaacgtcatcctaagaattaataaaggtgctggaggagaaggtggctgtttgtaggaaagttcaagtgctagctggaagtgtagcctgcatcacagtgccttacctgccagttacaggagggcccacctggaggccttccagcgtggggtgcctgccccataggacttagcgcatgaaggaggaagggaaaatgtgctggcagctcctcagaaagagaaggaaaaaggaagactctgacctacacaggcccagcttctcctgtcaaaccaggggaggaatgagaatgttaaaaagagacagccaggtagaaacaagagggatgtgtatgagttctttcctaacaaggaagagatgaaatcaagattctcctatggttgcctttatagggtatgaattcattaaatccttattgaattgccccactcattatgttttctaggaagctttgaaaaaaataggttaagagcaatggatcataatcatttccagatatgctaattctaaataactttcctaatatacatgtttacggaaagcatggaacatgatctaaatgggaaaaaaaacttgaaaaaattgtgggtgtgttttaaagtgttactacttgatgggcttattttactagagcgattgagataaagtgaattttattttttgttttgcccacaggtatcttggaacataatacaccaagaagtcaatactgagccatataatccttttgaggaacgacaagtgagtcaaaattacattaaactgtttaaaggtttagttttcattaatttatctagatggaatgatgaactagaactattttggagtcagcttattccacacaaagttatcatggaataagcttgagaacataacaaaaaaatgattttgtttttattgttgaaatttgagaagggaaggaaaaggtaatttttttccagcatacttatttcaaattataacagcgttattgttttattttattatttttaaaattttatttatttttattttaattatttttgagacacggtctcactgtcatccaggctggccagctttattgttttaactggtataatgagcatataataatttataagtaagcttattcatgcgaataatacagaaagataaagaccttctctactataataatgattcaattagaaaacctactaatataatttagttcgttaatatgcatcataagagaaaagttgtcttatcaactcaaagttgctgtaaaggtattggataaaattcaggtcactgtcttgaccaaaactagtaagaaaatgggaattgatgaatatttctcaacatgctaatattttaagccaaaagccatcatcttgcttaatggtaaaacatcaccattaatatttattgttatcctgggtatattaactgagaaagcagatatgagaaagaaagaagatagaaaagaggagatgtgagtatcattatttacagaggctagggctgtgtaccaggaaaatccaaaatgatcaactgaaaacctacactaacctatataaacctatacttgtatataaaaatatatataaacaattacctgttagaaagtatgttgaaagaaaatattttcaataccaaaaaagagataaaatacttaaatgtatataaagaaaaatttttaaatgctatggagagacacatagaagccttaaatgaaaagatatttcatgtacttggataagaacacatattatgataatgagattggttctccctaaagctttttaaaatttaacacaatcccagtatatacatgaacagggcaaattagttatgtatattgctgtatatataacaaacaacctcaaaagctagtggcttaaaacagtaaaatatttcacaattgtgaaatctcacaatttcgctaagtcaggcattcaggagcagtttagttggatgcttctggagattctcatgtagctagccaagatgttgaccagggcttggtcatctgcgggagtaactgggcccagaggttctacttccaagatagctcactcacatggctggcaagcggatgttggcagttgtcaggaagcttcagttccttgccttgtggacctccacctagccctgcttgacctcatggggctggcttttcccagagtgtgtgataccaggcagaagcggcagtgctttaggaagtcacaaattatcacttctgcgcattctcttggtcacatagatcaatccaccaaccctgatacatggtaggagaggtctatacaaggctgtgactaacaagaggcctggttactgcacaggattaatttgaaactagacaaattgattttaaacttcatatgtaaaaatgaacatcaagaatgggtatggaagagaaactaagaaaaggagttgtgcaactaaatatcaaaacacaatataaatctatctatattaccacatacatagaccattaatatgagagtgcctggccaacatgttgaaaccccgtctctactaaaaatacaaaaattagccaggtgtggtagcttacctgtaatcccagctacttgggaggctgaggtaggagaattgcttgaacctgggaggcggaggttgcagtgagccaagatcacgccagtgtactccagcctgggcgacagagtgagactccatctcagtcagtcaatcaagatggtagattggctgggtgtggtggctcatgcctgtaatcccagcactttgggaggctgaggtgggtggatcacgaggttaggagtttgagaccagctggccaacatagtaaaccccatctctactaaaattaaaaaaaattagctggccgtggtggtggacacctgtaaccccagctacttgggaggctgaggcaggagaatcgcttgaacccaggaggcacaggttgcagtgagccaagattgcgccactgcactctagcccgggcgacagtgcgagactctgtctcaaaaaaaaaaaaacaaaaaacaaaaccgaagatggcaaattatcagtgagcaaaaactggattattaaatacataggagaaatggattgccatctagaaaaaatcaatcttggtccctacctcattccttataccaaaataagttccaggcagattaaagattttagcataaaaaatggacctataaaagtatccaggaaaaaaacgggaaaaattttttgtaagatcagtaaacagcatgggaaaaaagaatgtttatattcatatacacatgcatgtaatgtgtatatcctatatgcatagcatatgtatgacaacaaatacatacacatacacatatcaaaacacaggagagaaacaaggaaaattatgtgcagtgtgaaacagatagagaactaatttccttaacaacaaagtttctataaatcagtaaggaaaagatcaacaatctgtcacaaagatgagaatggatgtgaatagacaattcacaatgaaagaaatacagatgatttttaaacatataaacagatgcccaccccacttgaaataggaaaagcaatcattcacattttgaaagatagtgaaactgaaatttctgggaaggcagttaggaatcgatctgcactcatatatgtatagagagaccagtgagccaaggggatttgtatgtttgttttgtctgtatttgaatcagcagaaaattgaatacaatctaaacctccatcaatagcggactagttaaattatgatatacctataaaatgaaatatcatgctgtcatttaaaaagcagttctatagttagatatggaatgtttgacaagatcaatgtctagttaagtaggaagaaggtcagagcttgtgtttcctgctgctatttgtacaaatagtgtttagtttttgctaatgataaaataatatatagagttcttaaattttttaaatgaataataccaaaaattatgaaagagaaattgaaaatcatctaccttcccatcactcatgttaatattttgatgtgtagccttccaggatgtttgaacatttacatataattaaacaatagtttttaaaagatgggatcacagcatatatattttatttgaaatttgcaggcttcaattaatatattgtagacttgtttccatatcagtaaatacgatttatagcatcattttaaatggatacttggttttccattttattaatgtgtgatcatttatttgaccaatttcttgttgttgaacatttagattgtatcagctttttatgcttacaggcagtcttatagtgaacattttggcctgtttactgttgttgaagtcttatgctgtgcttagctttaaaccaggtaggctctgttgtttaatgagtcagtgcttttgaccatcaaatgaatgtttttatcagtgatgggaatgttcacaaatgctttcttaaattagctgttagttttaggaccttgatgctagtataggtgattgctggcttctcaaccagtgagaattgcatttgaatcccagcattgctactttctcctgggactttgagaagttgcatcacttggttctctgatctattaaaggcaaacataatgtatttctcacagaagtatcgtgaagtttaaatgtaataacatagaggtggcatttagcttcctgcctgtctctgttggtaatttggggcatgtaaattcattcacgacagcaagttactattcactgtgatccttttgctgaattaagaattaaaatggaggtaactaaagtcttaaaccataaagttttgctcctggttgatagtaaggttgactgtttaattaatttagttaagcatggactctatttatagtactaaactttcggtctgagcagacaaagtggcatgctccaaggcaaaagggcatgtatggtcaatctgaccataattcacagttctccaactgatcattcacagagtttcaaatacttgattccctgcttttttacacttgaaagatactaaggtattgggggaaggtacaggaaatgtcagagctggaccaggtttgtgcctgggatagatttctaaagcctggctgccacagggaggacagttacctgcagctggagaagctgccagcatcaaacagatgctctttcagagttatatgcagtttgaaaggttttaaaaaataattacataaatgacatttattgtttgccaacagaatggtttctgggtttggggttttttttgttgttgttaagctggtgcaagaaatataactgacaataattcatagataatattttaatttgtcattttgaaataaccagcaactatttatttgaaacacctaaaagtaaagccaaagttaaaatgttctgtttatatctaaaatatgtataatatgtgcagctttttaaacctaataaataatcgttggtgttaattgtggagagtgacatttaaatcaaactgttgatctggtattgaacccttctaaagcaaatattcagaactaattatagtatagattggagaatttatgaatttcaataatatgaatgattatatttataaaagtgctggttttgctaagcagtgtttaggggtttttaattcctgaatgattgtgacatttcccttgtaaattttcatctgctttttactctcctttgtttattttaagaaacagtaaagaacaagatcataagtaggcattttaaatgatttttaatagattgttttgtaattcacttttagggggaaatttcacggattgaaaaggagcaccaagtattacaagaccaacttcaagaagtgtatgaaaattatgagcagataaaacttaagggcttagaagagaccagggacctggaagagaagttgaaaaggcacttagaagaaaacaaggtaatcctgtctgaaacctgtctttaattgcatgtagcatagttaggagaatgtgagtgtagctgtgcttgtgcggcctcagctgaacttctgcattggtggctaaacaaaagattctttctcagaatcgcctgcttcagatttcttcatgacatattaaagtggctgttgccatgctttagaacttctgcaaactgccttatgagaaaggggctgtaagtctgggttttcgtttagctatagttcagtttccctggttaactaaaactctattttatggtgactgagctctgaggtaaattcttgtttatattgagaggcagcataggaatagaggttcagaatgagagccctggagacagactggctgggttcagatctaggcatggttctatactagttctaatcttgggcaatttacttaacttctctgtgctttagttccttacctggaaaatgtgagtaataataactcacattttgtatggttagattaatacttataaagtacttaaaactgcctcgttagtaaggactcagtaagtattgtctgctactgttatgatcatcatcttcatcttactcctaaggaagtataagaataacacatggagccttagacatactagaactgtaaagtcacccagagtattttgttgagatctgctgaccttgaattctgttagtcaagactgatcatcagatacatggctagtggagggatagcaattagtggcaaagccagattgaattagtgagaaaatggaatcacagatgtgaggaaatcatggtgcatttgtttttaaaagctaccatcatctgtttagaaaggtaacaaaagaatagtaattcatttaagaaaggaggaatttgttccagaagtctggatcaatagctgggataacatattaaatagaagaaaactagcttagtgggaccttaatcaggaaacctatttactaagattttagtagaaatcttagggtcagtttgtaaaggtaactgtcataacattccccaggacctgtttatactcaagatgaggctggggagagtctaaggacaagaagaattagatagatcctgagactttactcagtttcctggctgggagaagtaaagaagaacaaaatcctacacagcatagtgacacatggaacacaagtttctataagctacttgtgggtttaacaaaacaaaatagttttataaactttatattgcctcaggaaacttcagttttaattcccatgtgggaattcctgtagctgcctgtttgagtgatgaggcagattggagacatagtcttaaaggtagcattcagccggtgagatatctttctttctggccgaggctttcctggctttataaattgctggtctgactgtgtgttctgtgtgcacagttcatcaaggctctttctttgtacagtcagtccagaagagtctcggaaataaagcacccagtgggagggccccagctctcaggcttttttttaacttgttaaggctttgagtctgctgttgcgtggccctactcaagagtgccttaaaagggcaattactaagccccccagatcacaggcctgataagttattagacttgccacgtaaaatgtatacctattccctaccaggataagtcgctaatctgagttccttgggttggtgtccacataagagtagatgagatttagccacagtcatttctttattaatggtggttacgctcatagctcatggagaaatttcttaaaacatagaaagaaatgagtggcttttcctgatatgtccctttggcctttgactgcagattgctgaggttatgagctaaccaacttttcctttatactccagttacttgatgccatgtttggatgtagcaaatgcatacccagccccttatagagaacagaaaaacagggaagctatagaaatctgagtgcattagagtcccactgcccataccacaccctagcacctccatgtagtagctttgtgatgttagacaatttcttcagcctctttgaccctcggtcttctcattaataatgtattgtctacttcacagctttgtgaggcctcacctggggtggttgaaaaaggacaggggctagccagagatagtaagtacagtactcaaggaggaactgtcccacccaaaattctgcttgtgcctctgctaagcaaattgtttttttacaaaccactttaagaatacttagcatatggccaggcgcggtggctcacacctgtaatcccagcactttgggaggccaaggtgggtggatcacgaggtcaggaggttgagaccatcctggctaacacggtgaaaccccgtctctactaaaaatacaaaaaaaaaaaaaaattagccaggtatggtggtgggtgtctgtagtcccagctactcaggaggctgaggcaggagaatggcatgaacccgggaggcggagcttgcaccgagccgagatcacgccactgcactcccgcctggacaacagagcgagactgtgtctcaaaaaaaaaaaaaaaaaaaaaaaggaatgcttagcatatacaggccgggcacggtggcttacacctgtaatccttgtaatcccagcactttgggaggccaaggtgggtatatcacctgaggtcaggagttggagaccagcctggtcaacatggtgaaaccccatctctaccaaaattacaaaaattagcctgatgtggtggtgggcgcctgtaatcccagctactcgggaggctgaggtgggagaatcagttgaacccaggaggcagaggttgcagtgagccaagatcgcaccattgcactccagtctgggcgacaagagctagactccatctcaaaaaaaaaaaaaaaaaaaagaatgcttagcatatactaagcatcagtaaaaatctgagcgaggtattatatatagctgatggggttctattattattcatgagctaagaatggcctctttaggcaattaggccagttatctattctctgccggcggaaaagtggctttttaaatttttttttttattttttagatggagtcttgctctgtcgcccaggctggagtgcagtggcatgatcttggctcactgcagcctctgcctcccgggttccagcattctcctgcctcagcctcctgggtagctgggattacaggctgcacgccaccaagcctggctaatttttgtatttttagtagagatggggtgtcgccatgttggccaggctagtcttgaacttctgacctcctgtgatcctcccacctcggcttcccaaagtgctgggaaggcaccgtgcctggccaaaaggcacgtgaggcaccgtgcctggccaaaagtagcttttttaaagccagaatctcttgttgtttttattgtaccctaacctatgactggcaggttataactggttgcaatattgctgaaggacataggttcatttttgtttgagaataaaattctcataacataaaatttgctgttttaaccattacaaagtatacaatttagtggttttttgaatattcacattattgtgtaaccattaccactgtctaattccagaaaacttttatcaccccaaaaaagaaaccccatatttattaatcagtcactccctatctgcccaggacatatggtcttaaggtgctttaatgagatgctaaaatgggcattgagtcaacattaggtcttaaaacactgtcaaattatttggcccagaataatttacagggtagaattttggacctttgtctgtattagaacagaatcttggccctgcctgccaaaacttcctcagcccacactggtgcagaggtgggattctcctcttcagtcatgggtccttgtcaagttcagccttttttaaatctatcatttatgaagctcctactatgtgccacactcaattgtttttacatgtatttaatctcaaaacagtccttatacaatagtgttatactgtagtacataaataaatctccatgttactggtgaggaaatggaggtgggagcagctgatgcagctttccccaagccacaccagtacgaagtggcagaacaggttgtgtcaggcttcagagcccatgcatttgttctcccttaagagaaggtcagctccacggcctagttcaactaactgttaggaatgtttctcaccactttacagcagtgtaggcatatcagttaatcactgtcataataatgctgagtgactcccagccacaaaaccccagtgacacatgactgtaatcgctaagcgtagaagtctggatcagctggtcctgcttgggctcggctgggtcagttcaccttagggctagcaagagctctgcagcatctttgctgttcttgcctacatatctgggttcagctggctgtagattgatctagaatggcctcagctgggatgactgggacaactagctctgctccacatgtcttgcatcttccaccctgaaaatcctattctgaaggcagtaggaaggtgcaaaggcaagcaaagatggccacacggcacctttcaagcttctactgacttcaggtctgctcagaccccaccggcaaaagcagtcacatagccagccagagcccgggctggggaagatagactttgcctccttagcgaagggaactgcaaggtcacatgataaatggaatggctagagtgtgaaggatggagctatgaatgccatccctccactacagtaggtcagcgccagtaatttactaacactcagtaattaccaagagccttctgtgattggtgcctgcttcatcttccgccttctcccttgccagttctctacattgttctctaatttaatggataatgtttgtcattcgatttctcacttccaaaccttttcccagtaccatcccttctgcctggagtggttttccttctccctgagcctgactccctcctgcttctcctttgggcatcactttcttgaggaaacagttgttgatggcaacctcaggcttgcttacaggcctttgttaatgcagtggtggtaataatgactatgtgagatggtaattatcattttataacatctttattgagatataattaaccatagcataacatttacctattaaaaatagacaacttaatggttttgatatatgcccaggtctgtgtgtagcacaatctaagtttcaaccattttcatcaacctaaaaagaaatcttatactcactagctgtcactccccattctctcctgtatcccagcccttggcaaccactgatttactctctagatttatctattctgggcattttgtataaatggatcatgttacatgtagtcttttataagtgtcttctttcacctatagtgttttcaaggttcatccatgtacatccatctatgttaatatgtatcagtgtgtcattcctttttactgtggaataatattctattgtatgactatatcacattttattcattcactagttgattgacatttgcgttctttccactttttcactattctgaataatgctgctgtgaacattcatggacaggtttttctttggacatatgttttcatttcttttggatatatatgtaggagtgaaattgctgatcatatggcaattccacatttaagcgtatgaggaactgcgagcctgttccaaaaccatcctaccagcagtatataaggattccagtttctccattctcacttacacttatcatcgtttgtctttttatttaggcctcctaatgggtatggagtggtatctcattgtggttttgatttttatttccctaaaggctaatgatgttgagcatcttttcatatgcttattagccatttgtatatcttctttggaggaatgtctactcagatcctttattcatttttgaattgagtttgtctttctattattgacttataagagtttttgggccaggtgcggtggcttacacctataaaaccagcactttgagagaccaaggcagaaagatcgcttgagcccaggagtttgaaaccagcctgggcaacatggcaaaatcccatctctacaaaaagttaaaaaattaaccaggcatgatagtacgcacctgtggtcccagctacttgggaggctgagctgagagggtcacttgagcccaggggttttgaggctacagtgagccaggatcatgccattgcaccccagcctgggcaacaacagagtgagaccctgtctcaaaaggaaaaaaaagaaacaaaacagggctgggcatgatggctcacacctataatcccagcactttgggaggctaaggcaggaggattgcttgagcccagtagttcaagaccagccagggcgatgtgatgagaccctcactcgctacaaaaaaattaaaaaattaaataaataattaggtaggtatggggatacatgcctgtagttccagctactcaggaggctgaggtgggaggatcacttgagaccaggaagttgaggctgcaatgagccatgatcttgccactgcactacagtttgggcaacagagcaagaccctgtctcaaaaaaacaaaaacagagagtttttctatattctggatacaagttgcttatcaaatatttgatttgcacatatttacttccatcttccatatttgtaaatgtatctcctgtctccattttgtgggttgccttttcactttcctaatggtatcatttgcagcacaaaagtttttactttgagtacactaagtccaatttctcttattcttttgttacttgtgcctttggtgtcatagctaagaaacccgtctacttcaagcgcactgcttacccatttaggtctgtgatccatttcacattaatttttcaaatagtatggtatagtaattatcttttatgcatattttctctaccaaactgtgatcttgaaagtaaggactgtttttcattttgtttgttttttgaatgggggtctcattgtattgccaaggtagaactcctgggctcaagggatcctcctgcctcagactcctgagtagacaagactacaaacacatgccaccagccccagaagggtggtttttaaaattatctttggttgacagcacctagcttagtatacaaactaggagctttgcaaatgtttatcaaacagtgtgtgcttggcccctgaaaagctgcatttaatgaattgtgttttcatgttctctatcagcctacatcagaggacatcaggctcacattctgtgaagtttgctgctttgtttactgctagtatggagttggggatattatccattctttcatgtgacagatatttcttgaatgttctcttaagtgtcaggctctgtgctggtcttgtggggcgtttctgcagcatcctcttcttgaggcccttctgtctgccatcacttccagggcctctcttgtgcaactggtttgtttttatgttttatattgaattgtacagttcattatattttctctttgaccttgtctgccagaaagttttcatgttatttctaaagaatggttaggactgcatgccattcatttttatattactctcactcatggttttgtattgtcattcctctctctctattctgttttctttatctgcttagcattctttttattttgtcttttaaatatttatgtatatattatctttttttttacaccatggaatactatgcagccataaaaaatgatgagttcatgtcctttgtagggacatggatgaaactggaaatcatcattctcagtaaactatcgcaagaacaaaaaaccaaacactgcatattctcactcataggtgggaattgaacaatgagatcacatggacacaggaaggggaatatcacactctggggactgttgtggggtggggggaggggggagggatagcattgggagatatacctaatgctagatgacgagttagtgggtgcagtgcaccagcatggcacatgtatacatatgtaactaacctgcacaatgtgcacatgtaccctaaaacttaaagtataataaaaaaaaatggctttataaggagaaaaaaaaaagaatgttttaatttcagtaagaatgaaacaataaaactttagaaaatgtaaaaaaaaaaaaattaaatatttatgtatatattatcaaaggtacctcaaatatttattttagaacaacactgaggtttaataaaaaagataagttttttcctaattgagaaaaagaaattgtttatagttatgtcaataaactgtaatatagcagatacagttgtgtatagcctatttgttttatgctaagtttgaaagaaaaacgttcaggagatcattctgtcttccatgcagtcagaaacaagctcgtgatagctgacctgtttagcattgtgaggcagctatggcattcagcagtggttagtacaaacagaagatgaactcatgtggtattttcgttgcctgagctatatgtgtatgtatgtgcacatatgtttataatactttgtgcttcttgatacttgaactcccttaggtacttgttgccaactaggttcttatgcctcagcataaccttgtggttgcacataatctcccagccaaagggatggatcccaggtgagatcattggctcagaataggagcacaggataggtgagaaacaagattggcttggctgccagcagcaaggcatacaaattcacattggtcctggtagaaccgaaccaggtggaacacaggattcttaagtagagtaggcatggtggtcacctcagtcacagtaatgactcaagaaattcaggatcaacaaggttgcagctaagaagatgtgggaagaactggttcctatgttaaagggaacattactgagctgttgttcaatttttgccacctaagaacagttgtcctgtgccaaaatcaaccttatccctgctgtaggattcagaaatcttaaaggaccttgactggttagcaaatctgcctttaaaaaacatgaaaaccttggtgtctaaggctgaagagggagtagtggtctcttaagttgatagagcttttgacctgagggccatgatttcctatggaatccatgtaggttgactttagtgtcctttcttacagagaagacctcgagtttctatagctgaaatgacctacgtgtgctctaagcctaagcaggaagttcaggctgtagggaacctgataggaagtaaaaaattaaaagtttccctaaagcaaatgtgaagttaggatttcattaagccgtcattgataatagtgagattttaaactagaaaatatttgtttcctttaaatattgctttgattcacgtttaaattaattattagaaatattaacatagggaatgttttacttataagtgactggtatttataagcatgtgccccacccaaaccccttgctacaattaaatagatgatacttcaaaaaagacatcaaacctttagagaatgtgtagattcagaagtttcaaaccagcaactacataggaagttgacaaagagggttaggtgtcaagtggtgctgtaccaaaccctccaggggaacggtaactagcattgtctccaaagaggttttcatttctctttgtcacactgcctgaaattctggcaggtatctcaacccaaatgcctttaatgaccagcaagaggattacatttatatttataaaagcaaacaaaaactattggccttgccaactaaaacatgcatacactccctgtagattagagaatcatttaggctggagagtaagtgtgaacacttctgggcacgtcggagtggttcttcggggtgtcttactgtaatcaggtacacgtagcgggtaggatgtggctgtctggtgtgacttggtgtcccaggcttggctggggggcatagtctgccacagggcgccagcttgggagtgtgttccactgaacttaggtcattgtttaagctatggcaccgtcacaattctagcctttcagtctcttttgttaaaaagtatattttgccatttatttaagtactttctaaatgtttttagatctcaaagacggaattagattggttccttcaagatttggaaagagaaattaaaaaatggcaacaggaaaaaaaagaaatccaagaaagactaaaatcactgaagaagaaaattaaaaaggtttcaaatgccagtgaaatgtaagtaatgattgaaaggcagtaatttttatttaaaaaaaaatattgtggcttttggttattttcacatttttgatatttaatattaaactacatcaagtaaagtaaaaatgaatactgttttcattgttttgtctcatttaaaaaagtattcattgagtaattatctcacctgaatttttttctaaacttaacattttttcagataaattatataaaagtgagagtagcatggaactgagaatccccaaggaactgacttccttccagtttgaacaccatccctttctctggccctcttttttcttatcagcaaaacatgggggctggtctaaaatctaaggttcttttcaaaagtaagattctgtgatgattatttataattacttttatcctgaatctataaattattaaaatttgtcttgtagtgtgaacgatttgataacatatacagatcctaggaatgattgtcaggtgggccaagagtgtgttttaagattctctgtgatccatccctaacctccctctgctcttaacagtgataggtcaaattcttcagcttgttttctaccactgtgtaagaaaacacccaaaagtcagtttctttattagcagccattgtatttgctcatggtcctgcaatctgggctgagttcagctgggccattcttctgctggtcttgccaggagtcctcatgtggctgaatttagctgggtgatgactgggggtggcctcagctgggatgctggggtggcttggcctcactttctctctgtgtagcctctctgtgatttttatttatgtggtccttccatatgatctctattatgatagccagacttcttacatggtagctaaggacttcaaatggtgcagaagtggaagccactaggcctcctgaaggttcaggcccagaactgtcacagcatcatctctgctaccttttattccttaaaacaagtcataggcttggtccagattcaagggcatgaataatgggaggctgggttcactggggggccacgctacacactcacctttcaagggcttttgtgtttttccatgccgcatgccatatgatcagatgactttcattatgagtcttgctagcattacatttaggcagtcctcaaacaatgaggaaaagtaaaacactgcctcagaattttcactccctgtgtcatgtcattttgatgatcaaagtagcttcactagtagaacacacttacggaaacaataatgtctgtaaagctttttacctctaatatttgagcatgaccagtcttggtcattttgttactaaaaagtgtggaaatatttatatttaacatactttttttgttcaattcagacatactgtcaaactagacaaggtaactagaggctgttaatgataagaaattttttttctgtactagcataaaagttaatttctgctggagaataaactttttattgttgacttttttccattttattattagatttctttacctttcctgtcacaatttaaagataagccacacgcttctctctaagttttttgcttttttttttgagacagagttttgcttttgtcacccagcctggagtgcaatggtgcaatctcagctcactgcaacctctgcctcccatgttcaagcaattctcctgtctcagcctcccgagtaactgggattacaggtgcccaccaccacgcctgactaatttttctatttttttttttttttttttagtagagatggggtttcaccatgttggccaggctggtctcgaactcctgacctcagatgatccacccatctcggcctcccaaagtgctgggattacaggcatgagccattgcacctggcctgctttttacattttccaaataaatgctttaaagctcaatttttctatttagatttttaagtaaaatctttaaactttttggatctctttctcagagatgcacaagggacatgaaaaatgatttcttggatgtttctgtgctcttgatcacacttagtattcgttaagaaatgactagaacatagagctcatgattggtacagtgacacaaaccacagatggctatgaaagaaggcagggcttccatgagagtgtcagagtgtcacccagtatttgtctatttagaggagggaggaagtgttttacaaaagaagtaaaataatagttaaactggcttgtattagaaacaagcggctttagtaaacagagatgactgcaaaggtatctcagggtagcatgaaagaagaggcagaacccgccttgtgcagggcatggctcaagaatcggagattcacacacttgttttgaaggattatcagagaatgtgagtgtgtgtgtgcgtgcgcacccgcgtgtgtgcatgaatgcttgttttgactttaagttctgttttaaagagtagaaggctgttttcattttgaatgagaatccacatcttctcattttgaataagaatctctggttacactgatgatgatgccgcagtacctgtgttctctgcttgagctgcacatcttagactgagatagggtgatttacctgtaagcatatgacttagagtgaagaaaaaggtgatctggaaggaaaatttcccaaaagggaaatgacctcaaattattttcctatttagaagatactaaaaatgaaacaaaatgtaaaaatatatatattaaaaaatcaagaaatgtttttaaggatatgggtgcaatttactgtgtgggggtcctgttaaaaatttttcaaaattaattaatatttggtgattatgcttttataggtatacccagaaaaatgatggaaaggaaaaggaacatgaattacatctggatcagtcccttgaaatcaggcaaattaagcttaaatttatttttaatatattttaatacttttaatgccaggagtacaagcacagtagactttgaaatatattgttgcttgtctatttcttttaaataattatgtttctgttttctttatttctatttctgttgcattttaaaaattaatttataaatatattctttgaatatttaaatatttttattttacaagatttctgcatttatttcccattgtcaatataaaaatactgaatttattgttgtcaactttttttggattaacttgaaactataaacatgttgtaaaaacttttcttttgtgttacttggaatattcgtctccactgtaggctggtagtttgttgctgttattgctttataattataggttcattaaatttttactatgaatctatgcaaagtttccttttaacccttgcttgctaatggaaataatatgttttcacatactgctaaccagtacattcagtgataagcagttgcattctgcttttctcactattgtttcttacgcacattcccatcccggtttttgaataattttgtacagatttctttttccctttgggttctgtccttgtaatatgcgtcaaaacagagtttctggctcaaaggatagggaatgttttataaagcttactttttaaaatttttatttatttattttttgagatagggtcttgctctgtcacccaggctggaatgcagtagtgcagtcattgctcactgcagacaccatctcccagctcaagcaattctctcgcctcagcctctcgagtagctgggactacaggcacgcaccaccattgtattttttgtagatatagggttttgccatgctgtctaggctggtcttgaacttctgggcccaagcgatccgcctgccttggcctcccaaagtactgggattacaggcctaagccactgtgcccggcctatacagtttattaatgtcaccagattgtactccacctgccctcataaaaatggtgaactggaacagtaccctcaccttgattctcagcatgcccacctaatgtgcacttccatttcatatctgcctttgatcacttataaagcacaaagagcacacttgagcctgtgtattgtgtagtaaaatatgagatgagaaactgctctggaagatgtagctgaggctatcgtggtgtggtttcaaagctcatccagcctgaaacctttgtcatctcactgtgaaattttgttcaagaaagttttttttttccttcaatatttgtagcaacacacttacaaatgagaaaatgaaaatagaagagtatataaagaaagggaaagaggattatgaagagagtcatcagagagctgtggctgcagaggtgagtccatgacacttagtgaccactatggcatttgtcatttgtttttgtgtttctttaatgacatatgaggcataacagacattactgaaaagtgtggtgcataaaggatatcctgtaacccataatatatcctccctaaaacgaccactctttttccttgcctatagccttgtaatgttttaccggtattatgttgttacttaaatgcactcatagtgtacaccaaattttgtaacctgccttccttatttaccattataattcagccatttcctatattatacactttgaatactttcatcatatttaatcaagtgatgtaccatgaagtagccaaccatatttgccaatacttggaaaggaacttgaaaataatccacatattaagaatacgctccttctgcccctagaagaatatatagcaatgtcagtacactgtttcagaaactactgagacaaaaatcaaaattatgacatctggctgtattttatttagttccagaaacatgattctctatgtttctgtagctgagaaacaaatgatatttattggcatatgtgtctgtgattattctggtaaagtaagaaaagacttagtttatacagtctgcaaacattaggcttttcaattaagaattgactatgcacctgcttctaaggacaggaaaggaaaaagagccaaagtatgaatactttttgggtcctacaccagcatccgtattcctgagcttgtttaattcacaccaccgtttggtaagcaggtttgcctggtgggccctgtcaagtttactgacacctggattaaaaggctatttaatggatcatttggaccatgaggccattttacatttcctgcagtgattctcacaaaaatggccagttggtttgtggggaagccacagagagtctaaaatcttaaaagcataccccgaagcttttgatgcccttgccgagaacagcttctctgaggcttttctaaacttgcagaggatgcagcctttattaagggttattctgctgcaggaccataggtaatgcacactcgtgtacacatgcagttaacctggctctgtgcttatatatagcttaagcagaaagccatgtacagttattcatatctgcaaaaaggatcatggaaggtatgcatttgtgatgtcattttgttctgttttcaaatctcaaagtctaattcatgttcacctatgatacaatcaagttctgatgattctgtcatgcttcatttaaggagaaatgggaaagtggtttgaatgtttaagttttaacctttaaaatagtttcaggctgtcatttgtaaaatactcatatgtcttctgatctactggcaggtatccgtacttgaaaactggaaggagagtgaagtgtataagctacagatcatggagtcacaagcagaagcctttctgaagaagctggggctgattagccggtattgcagtttcgtgggtgttctcagcacgtcatttagaagataaagctaggaccatttgagaaaaacattattttgtattaggaccattttatttttaatagttatataattgatacatgttcaattgtagaaaagttaagacatacaaacaaaaatgataaaaatcattcctaattctaaatggatagataacatttgtattttggaataaattcatgaagtgtttgaaaaaatgaaaatttatgaattatttttactaaatagtatataggaaatttattttcatattggtaattacatatctccaacctaattttgaaaagttggatagtaattgagcatagaaacatgtcatgatttaccaaacactgctgtgctggaacagtggagttgtttgtgaatttgtgttaatataagccaccctgcagtgagcatccttatagttaactttttatgcacattattagtcatttccatgcagtaaaatttggaatgaagatcacattttcaaggcttttaaaattttttgccaagttgctttccatagtagctattatttaacagtctgcatgacagcatgcgagaatgtttacaaagtatattcacacatgttaattttttttcaactctccacataatctctacctgtttttgtttgtttttttgcgacagagtctcgctctgccacccaggctggagtgcagtggcctgatcttggctcactgcaacctctgcctcctgggttcaagcgattctcttgcctcagcctcccgagtagctgggattacaggcgcgtgccacatgcccagctaattttttgtatttgtagtagatatggggtttcaccatgttagccaggatggtctctatctcctgacctcgtgatccacccacctcagcctcccaaagtgctgggattacaggcatgagccaccgtacctggccttgttcttgtttgtttgtttttgagatggagtctcgctctgtcgcccatgctggagtgtagtggcgtgatctcggctcactgcaagctctgcctcccgagttcacgccattctcctgccttagcctcctgagtagctgagactacaggtgcccgccaccactcccagctaactttttgtatttttagtagagatgaatttcaccatattagccagggtggtctcaatctcctcatcttgtgatccacccaccttggcctcccaaagtgctaggattacaggagtgcctcccaaagtgctgggattacaggagtgagccaccacgccggccggccttgtttgtttttaagataaggcttgctgggattcctagaggatcttcttcaccctagtacttagcacttctctatgtgggattacttttcattgagtccttttaccatgttctatacacagattttgtgtttttaatcccagggttttgatccttcctggtgcttgccttttgattcaaatttcaaaccctcagcattgaaccagagattgtgtgaatcacggacagttttagtgtatagttctttttctttctttttttttttttttttttttttttttttgagatggtgtcttgctctgtcgcacaggctggagtgcagtggcgtgatctcggctcactgcaacctccgcctcctgggttcaagtgattctcctgcttcccgagtagctgggattataggctcccaccaccacgccaggctgatttttgtatttttagtagagatagcatttcaccatgttggccatgctggtctctaactcctgacctggtgatccgcctgcctaggcctcccaaagtgctgggattacaggtgtgagccaccatgcccggccccttcttcattttcaagatttaattttttttcatgagaaaacttttctgattaaaagtaaaatgctgatttagaatataggactagtacagctgaggttgagaccaagtggtagtcaaccgcctgtactaagcacccaccataggctgcattgtggctcatctgggaaacaaagataatctcagactcatttcatctaatagtatcaactcttccaataaacggtagagtatacaaagattctttcttcaggatgccatgctaactctgccttctccaccaaagtatagaaacatagaaaaggggtaaaaagaatgctctgttttttcttcaatatgtataatgaggtcttactatacccacagattggtagtgtttttgatcttctcaattaggagtagtcaatttatctgtcactttcaatagaccagattcatgaggtgctgagattcatgaggtgctgagattataaatttatcttaggctcatcctttatttttatattaaggtaatgattagggtttgattggaatcttttgaatgtttcagactacctttttaaaaaatctttaaatgcagacgctgtctttaatattaaacataaagatgtcagatgaagaacggtcaaactttcaaatttgggaaaagaacttaaaattcaggagacttattttctctctgcccttcggttttagagtttttgttatattaataattaaaattttctaaagtgtctctagtggcaagtttacaagataagcaattccttaaaaatagttggatttttgtgtgtatgtgattatgttaaatgtctcttttgctcatgtttagatgtttatttgaccgtaagtgcttttaatttttaaaatttctaaagcagttttatattatactttttcagtgatcctgcagcatatcctgacatggagtctgatatacgttcatgggaattgtttctttctaatgttacaaaagaaattgagaaagcaaaggtaagttgtaaacatcttttaatcccatcaaaatctttatgatagttataattctcgggaggctggtgtcatattgaatctatttcttttttatctattattatcaataattttttttgttgaaagtattatgagcttttcatggaactaatggttttgttttgtttttttgagttggagtttcgctcttgttgcccaggctggagtgcagtggtgcgatcttggctcactgcaacctccgcctcccaggttcaagtgattctcctgcctcagccccccaagtagctgggatcacaggcatgtgccaccatgctcggctaattttgtttttggttttggtttttagtagagatggggtctctccatgttggtcaggctggtgtcgatctcctgacctcaggtgatctgcccgcttcggcctcccaaagtgctgggattgcaggtgtgagccaccgcgcccagccggaagtagtgatattttcttaattaaattaaccatcttgacctctgccttgattggtaagattagaggagttatgtttgaaaaggctttggagcattcggtttaatgaggtcttattttgaatttccttaccaagacagttatgtttcatttataatgtgtaggaagaaacaaagtattaattgacaattgtggttttcccacactttactttctactcacagtctcagtttgaagaacaaattaaggcaattaaaaatggttctcggctcagtgaactttctaaagtgcagatttctgagctttcatttcctgcctgtaacacggtaagtctagcacatcttttttttttttttaaaccataattcatttgttaactggccaaagtagttatttgttgttgtttcctgggagtgaggatgagattggttaataattgccttaatgtttcattattggtgctactgattaaccttttaagctttataacattcttatataaaatagatcagtctttctacatctgtatgagggatggactgagatgaatacaccattgctacatttctatcactctcatgttccttggcctgtcttctatctttgtgtgtgtgtgtgtgtgtgtgtgtgtgtgtgttgtatatgtattcctgactttgaacaaataatccaggagtagcagttgcctgttgcgcactgcttttgtgattcaagcaggccgctatcaccacctcagattatactcttattcctagatatttgggacataagaccaaaatctaaaaattaagaggtttcctcctcaaatacagaataaaagctgctatgcctgaggcatacagggctttgttggtccggcacatcatattttactatttgtttgaggtatttgccgaatcttgttaataacagtgaataatcttgtctttttattttaatatacacagcacagtaaagaaaagcattaattgcattttgtggactttacaacatggctaaacccatatttcttagatttggacatagatagatgcttagtaaatactaaattgaaatgaattaggcccagaggagatcagaccataggaatttaaagttagatcttgagagaaaacttaggtaaaaaagaaaaacaaaattaaaggaggactgtgtgtgagagttgaaagatataagttccagaatgttgtggcaggacagtgaaatcttctggttcctaaagacggaggagactctctcccagcacctgacttccaccctcccactactgccagacctttgcctgggctgttcctagcctggagcactgtccccgctctgcatcctgccttcccctgaaaccccgtcaggcgtgccctcttttggcctcccactgtgtcccttctctcatgtgcattagatctcagcctggccttgaatgtctctttctcaccagtaccttgcacagtaaacattcaaacttactgtgaattcatctgaaaaaaaaaaaattaagtgtggaaaaagtgtgaccaccctgaactgagtaaaatattctgttgagatccagttttttctctccattgaatgtgcagttttagttagaattacactaaagggcacttatcatttatcgtttttccaagttcttgtaacagatatgtatagagaaaacgttggctctcaataggatattttactgttagtttgtaatcctagcttatgttattttatcaatactcaaaaggattttcatatcctaaattctgggaactcttagtgtgccaggagcttgagtaataagtgtgcctaaaaattatttgtatctcatttctccctcattcattcattcggtaattagtggtgataaagactgatgtgggctgtgccctcaaagtgcacatggacttggggaaaggcagactttaaacccattgttacctgcagcagagtgaggtttctcatggcagaatgctggagcggcgtggatcaggggccactaacctaatctagaggtgtggcctcagcgggagattcccagttggaagtctcccagagacagagatctgcaataggaacttaccagacaaaggagtgagaggggtgtgtttggacggttagagttccagatggaacacacagtgctcctggagcctagagagacagagaacacactcctttcatactgtaatagaagcccagtatgacgcaggggcaaagccaatggagccttcttctctaagctgtgttacagcagcttagacacttctagcttcattagaccagacaggataggtctcaaataagggaacagcagcagaacaggagtccctccttcttcatggcttcgctttccgtggtttcggttatccgcagtcaaccgcagttagaaaatactcaatggaaaattccagaaatacataattcctaagttttaaattgcacactgttttgagtagcgtgatgaaatctgtattctcacatggtcacattgtgacctcctccctttgtccagtgttttcatgctgttgctgctccctgcccgcgagccacttagaagctgatttggtgaccagatgaacttctcgcgttaccccagtgcctgtgttcaagtcacccctattttactccataatggccccaaagcatgggagtaatgatgctggtcaatcagatatgccatagagaagcaatatattgcttcctttaagtgaaaagctgaaagttctcaacccaataaggaaagagaaaagatcgtatcctgaggttgctaagatctatggtcagaacaaatctacccatgatattgtgaagaaggaaaaagaaattcatgtacagtatatgtagggttcggtactctttgcgacctcaggcattcactggggggtctcagaatgtatccctgaggattacgggaagctactatgctttttgaagatgagcttgccactaatgtgggggaatgttggggaggggcttgagtgatttccatttgttcgattatcagtttattgccatcagcctgtcctggatggggcatggcagtgggggtggagggaagagaacagatgtgagaggtgattgggggtacatttacaggtgccatgctgctcaggagaccaggccccatgtgtccacgtgggagttgagggtgagtcttgggcttccgtccaggagtactaggggaagagcaggactggggaggctgcctgaggctggtttccaaaacactgactttgagttgccttggaatcacccaagtggatttgcagatttggatctcaggaaaatattctagactgcaaacttttaaaaagatttggcctcaggcagctgcatggggaggagtgtcagcactgcaggcgtggacggaggcctgagagctgccaggagagctggcagggaagaggaggcggccccctgggatggagacagctctggggagtgtggtggccatgatgttccatctgtcagctacatggtttagctcagaaggggaaaagtgtaaccaggtagaggctgaaggagggccagtaggcaggcaaaatggtctcatcttacagagaaaatagtgacttatagagataattatttagaagtctgagccctcctactcttgttctaataactaacaagttattgtcaagaattcttttaaaacgaaaatatttaattcatggtattcaggtttcctgtgcacggagcctctgcgctgcgttactgtatttattcatcggcctttgtccttgggcgtttcatccttcaagggaagccctaagtgatccatggtgtggtgtgttcctcacaggttcatcccgagttactccctgagtcttcaggcgacgatggccaagggcttgtgacttctgcaagcgacgtgactggaaaccacgcagcacttcacagggatcctagtgtgttctctgctggtgattccccaggggaggctccttctgcgctgttgccagggccaccccctggtcagcctgaagccactcagctgacagggccaaaacgggctggccaggcagctctgtcagaacgaagccctgtggctgatcggaagcagcctgttcctccaggacgtgctgcgcgttcaagccagtctccaaaaaagccgttcaatagtattattgagcacctgtcagtggtattcccatgttacaacaggtatgaacagaaaatgtctgtgactgtgtttaatactttatcgaactgaggtttcctgattagataaaatcatggctagttaggtgttaacatgaaaagggttgcataattgttttgctcagaaagacagttgctacatttctttctttttgtaaatatagagataagtattttcaaataaattggtgggttttttctttctttttttttttttttttgagacagagtctcactctgttgcctaggctggagtgctgtggcacagtctcggctccctgcaacctctccctcccgagttcaagcgattctcctgcctcagcctcctgagaagctgggattataggcatgcatgactaagcctggctaatttttgtatttttagtacaggtggggtttcaccatgttggccaggctggtctcgaacttctgacctcaagtgattcacccgccttggcctcccaaagtgctggggttacaggcatgagacgccacacccagcctcaaataaattttttaatgtgcatatgtaaattgaaaacattgagcactgggtaatattcatcagaacccatgacaatttgctaagattttgatgagaccaatagcactgtctaaaactagtgttatagtatcaataaatgaacgcaaaacaataattttgcatcatttggggggacaaaattatatatagcaaagaaggcagcagcaacttaaaccttgttatataagacctctgatttgttagagtgtgaggttgaagactggatggaattccatagtgaatggggcatgtggacatgttaacaaggggtccttgtgaatgtgggaaaaagctgcccttacctgagtgagcaagagctgtaaatagagttgggatgatggcaggctcttcagtagcgtttctgcctccacctctggtttccgctgttcaggttgttacgagggggacagagttgcctcttgtctcagctgtgaaagatgatgaggtagaggcggtgtctctgaagtgcagctcggatcaaaggactctatgctcaggaatgacctttggcatgtgccctattatttcagtttctgagacagtgttaattacaggcttcaaaattgaaatttgtaaacaatggggcagttaaaatatgattagccagcaggcatggtggctcacgccaggccgaggcaggtggatcacctgaggtcaggagttcgggaccagcctgaccaacatggtgaaaccccatctcttcttaaaaaaaaatggcaaaactcgcttgaacctgagaggcagaggttgcagtgagcagggatcgcgccactgccctccagcctgggcaacagagtgagacactgtctcaaaaaaaaaaaaaaagttatgctttttagatagttattgttgttatcagtggtcttcagattaattttatgtgcatttgtctttgtttctttgggttgggctgttggattaatattggcatgtaatatttcttagcagtagagaactttctgttgtcattcatcactcactctccctttcagcactgagcttgctggttttattaaaaaagtgcgaagcaaaaacaagaactcactctcaggattgagtattgatgaaattgtccaaagagtgacagaacacattctagatgaacagaaaaagaaaaaggtattttatctagatgttccagtttatccttatttatttataaaatatgagaattgttaaaaaaaaaaaaaagcttcaaaccaaaacctagagagcaatgtactaaagacagaagatggtcaagttgttggataactggttgcttccctcttgtcccctccccgccacccctgttattttcgcagccaaacccaggaaaggacaagaggacttatgagcccagctctgccacccccgtgaccaggtcctcccagggctcaccctcggtggttgttgcaccatcacccaaaaccaaggggcagaaagcagaagatgtccctgtgaggattgtatgtataactgtatagttttgttttttaatgaaaaacaagaagcaaacaaaatttttaatccatgatttagccccattcatttctagacctaatttatttgatcccaacattagaaactgaatttcaatgtacttgaatgtgtccagttagagcaatcagtgaatggccgaggtcatggtgtctgctgtgatacgtttgggcccagcatggagagaagcccctgcacatgagtgacaagggctctgaccatcgtgggggatctgagccttctctctcttgcccttgttttgctgcagatggtcaagtacatgaactttgtacatccagtgtggtattttgaacagttggggaaatcatttttgaataattttcttctgtgtaaccatggctttggaattacacagatgtgtcaatgtgtcgtgtggccacacccaccccaagatagaccgtgattgcctggagaagagggttctgtttttgcttcatgatggatgtttgtagtaacgaagatataaaagctgacttactgaaacttcaccagattgtatgagaaagaaaaatatgtgttcaaactgggacctaatttgataaccatagtttgttaaaattaaaagtattaattttcaaattacaaagtattacatacaatagaaaatacaaataaaaagggcatttaaaaacccgccctgtaatcagtattaccactttggtatatatttttctaaactcttgaatgcatggatatgtgaattagtcaaaactgaatacgctagtcacactttgtatgttctctgaggggctgaatgttttggttgttttccatttttttttttattgtggttgtcctttttttcttttagttagaaatatactgtgcccatcttttctaggaaatagaaaacggtcaagttaagtgtatatttttttcaaactaaacctggctccgagctttgcactgggcattggagaggccttcaatggctcttccccggtctggcacttcctcttcttccctgaccctcgagtcatgggcagcagtggaggggcatgaaccctccttctgcagcatctgccccatctcctcctgggccgagtcatgccttgggagagacagcaaaaccctgaacagcagttcaaggtcttctcagccttggggtgatgcctccagtgccactccctgaacttgatcccactgccagggctgcctgcattcgcccactccctcagcaggggtttttagagcatgagtttgagctaggttttctgccagctgctaaagacccagatgggactcattttgtgccttcaaggcgctcagagttaagaggcagtgagctagagtagaagttaatggtgcagtaagggtaagtgctgtgagctgcagggagaactgtgcctggagtcccaggcgacactcaggtctgctctcacatcgaaagcactgtctatgctcaccagactgtgagccgctgaggccagagccctccattcatctctgcgtccagcacccgacaccaaccctgcccatggatgtttgccggatgagccatccgtttgttttgttttgatttgcacaagtaatccatgctcatagaaactagaaaatagtaaagaaaaagattaaatctcccttaccctgaggcaaccactgttaactgtttttctaggcatgtatgtatacatgcagcccctttattaaaaagtgagttatatatgatacatgttgtcttgttagctgctttcattcagcaggctgttggggccagctttctatgtcagggattatgggcttccgtcatgattttccttttggctacacaatagcccattgtgtggatgtgttggaatttactaccctcaactgttagatgattaaatgtatgattaattcacaccatgccatgtgattatcccatactgtactttaggtatggtaatcttcacctggggatcttctggtcacataaaacagttttttctctgaggaaattagaactttatacttttctttttgtatttttatattttttcttaagaaatgctattaaaaaataagttgtttcctcagactgtttagctgtaattgtgaataatttgccaccctttgtggcagaagatgtttgaaggccacttgaaggaagaactcgtgtcataaaaacaactgtagttattctttactattcaggtgtgtttgtttccacaggcactgggtgcaagttcctgtgaaatatgccacgaggtgttcaaatcaaaaaacgtgcgtgtgctcaaatgtgggcacaagtatcacaaaggggtaagagctctttttggccatccttacagcatgcattgggaccttcaaatattttcaaaataagaaaggaattgttttctagtcatcagtatttattgtgctttcaaactattttctttgcaaacctcccgtgtcagtgttcagtgcctccctgtcctcacaccagctctgcaggaagggcagctctggagaccgtcctttccatcccttgtggggagaggggaacagcagctccagccactcgttagtgctgagattcaaagcagtattagttccttgaaaggtgatttcttacacacttgactaaatggagaaacagtgaaaccatttttttgacttagtgtagtatatgaagtcagtttaacattttagaggagaaaaactaaacctagctgagtcccttctgcctgacccagggacagtcctgctcgtaccgttctgggatctgtgtgtgaactatcatggtgttctaggtaccgtgagcatttgtgtgcacccctgctgctgggttagaacagatcaggtctctgccatggggatttgctaatcccttggaacgggataaatacagcatgctcactgaaaggaattgagaccacttgccaagtctctggtgtggtgtgcctccttgggtacagggtcttatatttgggctagctgactgtccacagcctctgcagtgtgggcagcagcagcaggagtgtggcgtgcaggctggagggctgttccagagccaagggccaaggccaggccaagggatgggctaagaatgagtgattgggtcatagggccgagaatgccaggctctggaatttggcgcagctgaagtggaagagccgagcctggaaccggggatcagggcaagaccaccccctgaggccaggttggaggcccagagcgctcaggatctgaccctgaggtgggatcgtttgcggctggggctttgtccacactctggcctgagcgggtgttggtgtccctgagtattgggcagctccaggcccaagagaccaagggcaagtgagccacgcctgccaaggagcccagcagcacaggggagctaagcttcctcatggtcctgaaggcatcttctgattttgttttctccttttcagtgctttaagcagtggcttaaagggcagagcgcttgcccggcctgccagggtcgtgatctcctgacagaagagtcaccttctggaagaggctggcccagtcagaatcaggagctgccttcctgctcttctaggtagtcacacttcactaaagtgtcatccaccagtgtgttgaatccgaagaatgacaattttctaccactggtgtaaaaaacaaacatttgaagacccttgtgcattgtgtgtcacaaagctaaatacatggaaatcgttaatatcgctgatattaagtaatttccccactctgagtgaatactttgatgattgccaacagtggctaataaaatgacggctaccacactcatgggtcactggggctgcgcagggctctttgaggtgggtggcttcttttggaaagtactatgaacgtctcgaagcagtattctagtgataagaattcttaacatagccaagcgccccacgtttgttccccacgtttgttccccttttctgtttgaaaaacctgttctggtagctccacaagagagatgatactgactttttaaattttttacaagagtctgtattcctgatatgcctatatttttcctcaaagattctgcattttaaggatgggcataagcaaactatattttaataatttatagttaatgttaaaatattggctgatttagaccaaaagattcaaatctcctctttgtgaaatcccatctgcatttgattttttattattttatgttcccccgttagattgttttaagtgtttgcttttcatcttttatagatgtaatctgattttcaaaaatcattaacactttttaattagtatcgactaagactttttccccctggaatcgaggctgtgtgtccgtcatcccagcccccggttggagcctgctctttgaactccgctgccttccttagcagcttctgtcctcttctgtgagtcagtcagcgagtgcttgggatccgcatccagccgtgctgagcacacaacaggctgtgtgtggaaatggccaccaccattctccttccccaccccaccacaaaaagagaagctgtgtctttagacaaccctgaggtatctgtgttacaatcgttctgtgtttgatatttgtgtaaagtatgcatgcagtcttgtactgtgacctaagaacaaaactgtaactgcattagaaaccatgaaaaaattagatattgttttgtgacttttagacagtggtaaatatagaaccatgaattctggtcacattccatttctctccaacatgaaggatcaaaaaatgtttttcaatgtgttctttgttccactggaaacttagagtcatgagtttatgagctgatttggtcaccttcctctgcctttgttcactgtgagttctgatgtcttagtgacttagttcttagaagctcacgccttagtttgaaacagattctccacggtggtccccaaaacactgtctgcatatccataagaattgagcgctatgggtgttaacgtgcatgaggatcagtttgcagcagcaagtacaaaaggagaagaggaacatccgttgaatgagtgtgttttgtacataacttcagatacttgtgaacatgccttatatttgtccaacaactgtcagaataaagaacattctaaaatgagaagttcactgtcactcttgtccattctttcttagagaagtttaaaaatgcattcttctggaaaacttaggacatgtatgtcatgctaacattttaagagtgctttcgtcaggaaagaacagccacgccatgctgtgtctgaggagtctgaccagggatctcagggcgttttagggcctgggtcagaattttcctttgtgcctgcgtaagatcgactataggagttcacacagagatgatagagtttacttcttaaggctaaattaagagatttttcatgtgaatacatataaggatgttgaagataaattgcattccttggtatattttttgaggcatttgtggatttatgggccactgaggctgtcgatggggtttcctctatagaggggcttctgggtatgctgagcactcacagagtgaaagctcatttgaagaaagctcattttcaaaatctgtcttctgttttttcaagtgtattcaaagtattatcagtacgtatttttagtctgatggcatttaatttaatttaaagcaatgactattccttaagaatttaggccggccgcggtggctaacgcctgtaatcccagcactttgggaggccgaggtgggcggatcacgaggtcaggagattgagatcatcctggctaacacagtgaaaccccgtctctactaaatacaaaaaactagccgggcatcgtggtgtgtgcctgtagtcccagctacttgggaagctgaggcaggagaatggcgtgaatccgggaggcggagcttgcagtgagccgagatcgcaccactgcactccagcctgggtgacagagcgagactccgtctcaaaaaaaaaaaaaaaaaaaaaagattttagattagttttccctgctgaactgcttaatctatgttatgaataatggatagcctggtataaaattgaagtggtgccccagcaatgcaaaatgttactacggttttaaggtaatctcaaagactacagaagtgcccccacttattcgtgattttgatttccacagtttgttacccacggtcagccgtggtctgaaaataggcaagtacagtgcagtacaataagatattttaagggggagagaccacactcacataatctttactacagtgtaattgttctattttattactagttctagttgttcatttcttactgtgcctaatttataaattaaacttcatcatagatacatatgtataggagaaaacattgcatatgtggggattggaattttctgtggtttcaggcatccactggaggtcttggaacatatctcccacggataaaggatgtgtgtgtgtgtgtgtgtgtgcagtcgcagcaggtggtcaaagtgctcaacacaccacaaactgaagcagtaaaactattttagagtagttttttagtcagatgactggagaagggaattaaaggaaacagtagaagacacaatagcaaagatggaagttccttctgtcagcctgaggtacttactcaggaggctgaaaaagcagaggccgtaaagtgataggatggttggtcagaatgaggaccaaaaagcatctgcagtatgacctcagaaagaaagaaggtatcagaaggagaagctgggagggtatacagatgagtaaattcctggtgaagtgctcagcacagtgcctgcacacaaactcgtgataaccggagctaacaactaactgtcactaagattaagggcctggaaattgcacaagaaagagtaggatagtacagtaggaaagccgccgttagttaggaagtccacttcctcagtgtggcctggattggaacacgatccagtggtgaaaagagcaagaagaaatcagatcacctcaaagtcgttttggaaaataacagctttgttcctgagatctccctgaattgacttcaggaatattgtgattctatagcaatggatcatttcaccttttggctttcccaaattatcggactgagcagctttgagtcaacctttcctatccagtttgggttgaggatcagggccctgtggtgggctcactagggatatgccctggagcatcggtgtggccaggcaaggctcattgtagtggaggtgtgtagtccagactccctggcttagggtgagaactgttaccatttgttccatcatcgcctctactttttttttttttttgagacggagtctagctctgtcgcccaggctggagtgcagtggcatgatctccactcactgaaacctccacctcctaggttcaagcgattcttctgcctcagcctcctgagtagctgggattacaaatgcacaccagtacacctggctaatttttatatttttagtagagacacggttttatcacgttgaccaggctggtctggaactcctgacctcaggtgatccacctgccttggcctcccaaagtgcagggatttataggcatgaggcactgtgcccagcccattgcctccactttatactgtctcttcctattctccctttaaaggtgaaaaaagataaatattagcaagaatgcagaaactaaacaatagtaaactagaaaatcctaatgagtcatccattaatcaagtcggattgataaaccatcatggcaaaaagagacttttaactatgttaagaagaataatttgggggccagggcctggtggctcacatctgaaatcccagcactttgggatgctgaggtgggcagattgtttgagctcaggagtttgagacaagcctggacaacatagtgaaaccccatctgcaaaaaatgcaaaaattagctaggcacggtggcacatgcctgtggtcccagctacttgggaggctgaagtgggaggatcacttgagcctgagaggcagaagttgcagtgagccgagactgcaccactgcactccagcctgggtgacagagttaccctgtctcaaaacaaaaacaaaaacaagatctccatatgaaaataaatgaagcttgacctctcacagcatatacaaatgtcaattcccaatggatcacagtcctcaatatggaaagcaaaataatgcagcttctacaagaaaacagacaatcttcctgcccctggaataggcaaagattttaaggaatcactagctccaagaataaaatgttgataaactggattttggtctgcactaagaactcttaagttgctgttgagagagtgaaaaggcaaaccatgaagtggaagacgctggtaatccacacttccaacaagactcctccagaatgtacaaataactacaaatcagtaagaaaaagataacaatatattagaaataggcaagagatttgaataggcacttcgcaagtatccagatggtttgtaggcattttgatagccacatttgttcaaaatcaatcaccaaggaaatataaattagaacattgctggcagggtgatagggtttggattcgtgtccctgcccaaatctcacgtcgaataggaggaagggcctggtgggaggtgattggatcatgggggcggatttcccccttgctgatctcatgatagtgagtcctcatgagatctgatagtttagaagtgtgtggcattcccctttggctctctctctcctgcccccatgtaagtcatgcttgcttccccttcaccttcctccatgattgtacattttcctgagtctcccagccatgcttcctgttaagcctgtggatctgtgagtcaattaaacctcttttcttcataaattagccggtctcaggtagttctttatagcagcgtgagaacggaccaatacacagggtattttaagttgtcttgaagtttcctggttctagcaggtaggaccatgtacttagcaaggacctgttttgctgttctctggggcatgggtgaaggtctggggtgtgagaggctacagtgagctgtaatcacaccactgcactccagcctgggggacagagtgagaccctgtctcaaaaaacaaaaaaaaaaattgaatcatgtatacacttatatcaaaaaccaatgtactcctgattacctcaacttattatgttgggattattgaggtctatagtatctgtatggtggaaataccgtataatgcaactcttcccaactctgtgtttagtggggtgacactggtagcttgaaatcaaccatcgttggagtactaacaccacagtcattggcaaatgctgttttgcttccctggaaaagctggtaaagcctggagttctgctggtctggtggtgctggtctggtggtgcttgatacctttctcatttcacatttgaaatggtgattcaggcactcagcaaaccctgctgggatgatttctgctgagagagctccttcccattgctctttggctagggtcctcacttcccttgccaccgcctggccttgcctggttctctgccatcctggaaaggagacactgctctctgcagcgtctctggcccagagacaggccgagtctgtcattgcattagcctcttagtggttccttgggggccactcccagcagaacctctgtccctgccacaacaggtcctgtgctacgaaacaccaaggaagtccccttcctgcctctggccaggccctgcctgagagggtgcatgtgaatgcaaagcaggtctgtttcaggagtgcccaaaaagaagccaccaggaggacacctccatgccagaggtgactcatcttacctcccagaggaaggactggggccggtcccttggccttgccaggacagcctccacaacgagcagctggtatggttacagggctcctgtggcaggcactttcaaagagacaagcttgctctctgtaacatgtgcctttgtgtcaaacagacctgtcattgttttcagcaaataccttgggacttcagtgcataaataccattctaggtatttttcagaagttgtgtataaaggcattctgcctaattccttcagtcctctatttcagtttctatttatttggtgtgatagaaagctcttaatttagatctccccaccgccagttccaagaaatctgccaccagctccaagcctcatgtcctgaagtgccacctcattcccgcggggtgagccagcagcctctgaaaagaggaagccattgaacagatcacactgtgcctcccgccgctggctgccgccccagcgccagcaggactccggctttgactggggactcactggaggccacatcgcttttgcttccagtttccaaactgccaccacctcgaaactgccagacctttgaaagctgaggcacagtgcctcaccccttccttcagaagactgtccagctccccctccttcccctcctccctcccccactggggacctctcctaggggaggggtctggtgtcctcagctggctcctctccaccttcgcttctacccgggggctccagtgcatctggctttatctctggggtgagccatgcggccctggtcatctggacgggccactgaactccacacattcacctgttcactggctcatccattcattcatctggtctcatgtgctgccctgttctaggtgcttccatacaaaggggacagaagagatgatggaaggcctcagtactgcaggaggggagacggatgtcatctacaatcacacaatacatgggaggtcacaggtgatcccgaggaaaacgaagctgggaaggggatgagggagtctctttgtctaaacttgacccaggtttagacagaagccaggaacggcgtcatctgagtgcagcctgagggacgggggaggaggtaggggcaggggcgggcagtcaggcagagaagccagtggagcgatgcccgctagggtgtttccagagcccgaggaggccagagccgctctttgcctggaggattgtacagaagtggggattcccagggggtggatgggggtgggggctggggggcagtggcctgagcctggcagctcagggattcatgcggcaggcggtgcagcttgttggtcaacctcatgaaatactagttttgcacgtggccttagactctggggacttggtctggggccaggtagggggcatttctgatgtgatgtcacctgtgttactctatccgtcagggccttacggagcccttgcttcctccaacacccccaccggctttctcctgtggcttaaaattgacctagtcagtcctgccagtgggtctaccctgcaggcccatgggagcacccatggatcccagtcctggcccaagcacctgccctcactgctacccaccccaagccatcagcctcattctcactttacctcctcacacctggtttcactgaagcctgggccagccccctcaaccccttcccaagctcccatctacccctgccacagccctgctccctgcagcaggggcctcagaagttagtctcttggagcgctggggttaaatgaatgtgccttgcacatactagctgctcagtaaacacaaaaaaactcaacccaggctccagaacaagagccacaccccacaagctggctgtggtggcctctgaatctgaattcccacctccatgtgaccttccttaagcccctcactccagccctgctcttcaccatctcccaacatgatatttactaatggtcatttcaggtactgtgttacctgtccacaaacattgcagcatttaatttccccaagtaccctatgaagaagagattactcttgcctgcattttacagacaaggaaataaacctaaaaggttaagtgatttccccaaggtcatgtaactggaaaatgtcaggatttgcacttgctaagccaactctctcctctagccattctgcttcttcctcttaatacaaaacccacttgtcccccaaggttcagctcaggttcccatgccaaaaccaaaccttcttaggcatgcaggtggcaaaagccttggaacccctgtttactactgctcaccctcacaccacggctgcagtggctttccccttcacgtttgctcatgaggctgatgcagggcaggtgagacccaaaatcggggcttagcccgggagggttcttggcttcaccctggaaagaattcaagggcaagctggtggtgttaagacagcaatttttattgaagcggccatgcatagcggcagcacaggtgctgctccctgcagagcagggctaccccataggcagtgcgtccagagtaacagctcagaggcagtgctgcagtcctatttatagccacttttaattatatgtaaattaaagggcagattatgcaggagtttctaggaaaagggtggtaacttctgggttgttgagtccttgccatgggaaggggaagtaatgtccgggtgttgccaaggcaatggtaaactgacatggcacacgagtgaatgtgtcttatggacggttgcttctttttaggactttatatattctagacacaagtcatttgtcggatgtgttttgtaatttttcttcaagtctgtggcttgcattttcattttcttaacagtattttttaacggtcttttgaaattttgaggaaaagtcttcaattttgatgaagtccaatttattatttttttcttattatttttatacttagttttttttttatttaaaaaaaatcagcaaggctgggcatggtggcttgtgcctgtaatccagtactttgggaggccaaagtgggtggattacttgagtataggagtttgagaccagcctaggcaacacagcaagatccccccctccccatctcttttttcagaagaagaaggagaaggagaagagggagagggagagggagagggagggggagggggaggaagggaaagggtggggagggggaggaggaggagagaaggaaagaagaaggaggaaacaaatctgccaaaccacccaaagtcaataagattattcttctcaaagttttttagtgttcttacatttaggtctctgatcattttctagttgatttttgtatgtgctatatcatgaggattgaggttcactttctttttgcatatagttaactggttatttcaacttggagccttgaaatcatgtagcgtaagtcctctaattttgttcttttccaattttgctgttgactattctatttattgccatattaattttacaattaacatcaatttttaccaaaaagtctgcttggattttgatctaagcatctatagatcaatatagggagacttgacacctttacatgattgaatcttccactctgtgaatatggaatatctctccatttattcaggtattctttaatttctttcaggaatattttgtagtttctggtgtacacatctttcaatcttgcacatcttttgtgaaattcatccctaagtattttctatttttgatgctgttaacaatgtttactttaattttaatttctgattgttcattgctaggatataaaaaagcaattggtttttgtatatttattttatatcctgcaaccttgctaaagccacttattggttctagtagcttctttttatggattctgtagaattttctacataaataatcatgtcatctgagaataaagatagtttaaattctttcttcccaatctggatgccttttatttcttatcttactgaactacatacaatgcaattaagtccaaatgttgaatagaagagatgagagtgggcaattttacttcattcttcatcttagactgaaagcattcagtattttactactaagtataatgttgattgtagattttttgtagatgccctttagcaggttgaggaagttcttttatagttctaatttgctgaaagttttttttaaatcagaagtcaataacagatttgtcaaattttttctgcaatttggatgattatatgtatcaaattttaagttttccttgtttaatctgttaatatgataaattatttttaaatgttaagccaactttactttcttgggataaaccccacttggccatcctttttatattattgttgaatccaatgttctaatttttgaagtgaatattattttaaattgacaaatcataagtgtatatatttatgggatacattgtgatgttttgatatgtgtatacaatgtggaatagttaaatcaagctaacaaatatatccaccaactcacttatttttttgtggtgatacatctgaaatttactcttttagctattttgaatatacaatgcattattaactgtagtcaccctgctgtgcaaatagatcttgaacacttattccttctgcctaactgaaactttttaccctttgacaacgtatttccattctctctcctgtccctactccccagcctctggtagacaccatcctattctctacttctatgagtttgacttttttagattccatatgcaagtaaaatcatgtggtatttgtctttctgtgactggcttactttttttttttttttttttttttttttttttaaatgagacagaatcttgctctgtctcccaggctggagtgcagtggcatgatctcagctcactgcaacctctgcctcccaaatagctgggactacaggcgtgcgccaccacacacggctaatttttgtatttttggtagagatggggttggtctcaaactcctgacctcaagtgatccacccaccttggtctcccagagtgctgggattacaggtgtgagccaccatgcccagcccgactggcttaacataatgccctctaggttcatccatgttgtcataaatgacagaatttccttatttttttttccataagagacagccttaaataaaaaagaaagaaagaaagggaaagaaagaaagaaggaaagaaggaaagaaaggaaggagggaaggaaggaaagaaagggaaggaagggaaggaagggcccttttttttttttttttttttttgagacagagtctcgctctgttgcccaggctggagtgcagtggcgtgatctcagctcactgcaacctctgcttcccggcttcaagcaattctctgcttcagcctcctgagtagctgggattacaggtgcccaccaccacgtcaggctaattttttgtatttttagtagagacagggtttcaccatcttggccaggctggtcttgaactcctgaccccatgatccacccacctcagcatcccaaagtgctgggattgcaggcatgagccactgtgcccagccagaatttccttctttttaaaagctgaatagtattccatggtgtctatagatgtatcatattttctttatccatccatctgttgatggtcacccaggttgatttcatatctcagctattgtgaataatgattcagtgaacatgagagtatgcccggcctctttcactatcaaaaagataatagccattgtaacaggtataaggtgatatctttgtggttttaatttgcattttcctggttgggcgtggtggctcatgcctgtaatcccagcactttgggaggctgaagcgagtgaatcacttgaggccaggagttcgagactagcctggctaacatggtgaaaccccatctctacaaaaattacaaaaattagctgggcatgtgggccgggcgcggtggctcacgcctgtaatcccagcactttgggaggcctaggtgggcggatcacctgaggttgggagtttgagatcagcctgactaacatggtgaaaccctgtctctactaaaaatagaaaattagctgggcatggtggcgcatgcctgtggtcccaactaattagaaatagttgtttccaatttctaatttttaaaagttttttgcatccatgtccatgaagaatattaatctatattttcttatattgtctttctttgactttgataacaaggtgatttggcttcatataatgaacccagacatccttccttcctccctccctctctccgtttcccttcccttcccttccctcccctcccctcccctcccctcccctcccctcccttcccttccctttccaacagggtctcgggccgggtgcagtggctcactcctctaatctcagcactttgggaagccgaggtgagtggatcacgaggtcaggagttcaagaccagcctggccaagatggtgaaaccccatctctacgaaaaatacaaaaaaattagccaggcgtggtggcaggcatctttaatcccaactacttgggaggctgcggcaggagaatctcttgaacttggagggcggaggttgcagtgagccaagattgcgccactgcactccagcctgggtgacagagtgagactctgtctcaaaaaaaaaaaaaaaaaaagacagggtctcactctgtcgcccaggctggagtgcagtggtgcaatcccagctcactgaagcctcaacttctcaggctcaagcgatcctcccacttcagcctcctgagtagttggggctaatttttttttttttttttttttgtgtgtgtacacaaagtttctctatgttgcctaggctggtctcaaactcctgggctcaagtgatcctcctgcctcagactcccaaactgctgggattgcaggcgtgagccaccacacctggtttggtattcttttctctgtgattttctgaaagagtttgtgtggaattggtattatttcttccataaattttgttaaaagtcatcactaaacccatgtgggcctgtaatgttgggttttcattttggttaagttcaaaatatttcctaattttgatcttctctttaacccatgagttatttaaaagtatgctatttagtttccaagtatttggagagttttcagatatttttctgttactaatttctaatttaattccaagagtcagagcatatactttgtataattcaaatccttttacaattattaagactttgagttgttttatagtccacagtataatctatcgtggcaaatgttcatgtgtacttaaaatatgaattctgagccgagcgtggtggctcatgcctgtaatccgagtattttgggaagccaagcagggcagattgcttgaggttgggagttcgagaccagatgttgtgcaatgtgccagacagtcccagagagcgaagtctgattctgtgctcggtaagactttccaaagtcccactgacctccacctacatccgtgctgctgcccagtgatgtgaactgcatctataattttttttttttttttttttttgagatggagtcttgttctgtcgccaaggctggagtgcagtggcacaatctcagctcattgcaacctccgcctcccaggttcaagcaattctcctgcctcagcctcccgagtagctgggataacaggagcccaccaccacgcctggctaattttttatatttttagtagagacagggtttcaccatgttgccctcctggcctcaagtgattcacctgccttggcctcccaaagtgttgggattaccggcatgagccactgtgcccggcccataattttaagatttctaagagctgaatttgaaaagtaaaaatgagctgagtgcgatggcagtcacctgtagtctcacctacttgggaggccgaggcaggaggatcccgttagcctgggagttctgggctgtagtgtgctgtgctgattgagtgtccacagtaagttcagcatcaatatggtgacctcctgggagtgggggactaccaggttgcctaaggaggtgtgaaccggcccagatcagaaatggagcaggtcaaaactcccatgctaatcagtagtgggactgcacctgtgaataggcgctgcatttcagcctgggcaacatagcgagactccctctctaaaaaaataaaaaataagtaaaaataaaaagtaaaaatgaggaaatagaattttagaaatagaatatagaattatattttgtttaatctagtatatctaaaatgtttaaaaataaaatcaatataaaattattgtcattattattattattatctgagttggagttttgctcttgttgcccaggctgcagtgcagtggcgtgatctcggctcattgcaaactctgcctcccaggttcaaacaatcatcctgcctcggcctccagagtagctgggattacgggtgcccgctaccatgcctggctaatttttttttttttttgtatttttagtagagacgggatttcaccatgttgaccaggctggtcttgaactcctgacctcaggtgatccatctgccttggcctcccaaagtgctgggattacaggcgtgagccaccacgcctggcctaatgtaaaattattaatgaggtatattacatcttttttttttctcatcccaggtctacaacatccagagcagccacattgcaagtgctcagtagccacatgtggctggcacatgtggcccatggcaactgtgctggacatggtgggtccagacctcacttcattttatgtataaacaccaagtatcttgtgagctttactgtacgtgaatttctcaggaatgctgtaactgtgcacattgaggtttgaggtttgattgcccttttgttgtttttttctgaacgttactaagggttgttcataattttggaaggtagtattatccaatagcccccgccccctccgcgtccgcagtgtgagtcccctgcacaacatgcactgaagcctctgcatttgtagctctcacattcatggtgattctacccgaggccatgcactgaatatgtcagtatcacggcttgatatcttccagtttagctgtgcctgagtgtctatgtactgaaatctgtattattttataatacatttctttgttttttgagatggggtgtcactctgtcgccctggctggagtgcactggcgtgatctaggctcacttcaacctccgccccctaggctcaagtgatcctcccacctcagcctcccgagtagctgggaccacaggcacacgccagcacgcccagctaattttttgtatttttggtacagatggggtttcgtcttgtgcccaggctggtaaaatacatttctttatatttatttatttattttgagatgcagtcactctgttgcccaggctgaagtgcagtggcgcgatctcggctcactgcaagctccgcctccctgcaagctccgcctcccgggttcacgccattctcctgtcttagcctcctgagtagctgggactacaggcgcccaccaccacgcccggctaattttttgtatttttagtagagacggagtttcaccgtgttagccaggatggtctcgatctcctgacctcgtgatctgcccgcctcggcctccgaaagtgctgggattacaggcgtgagccaccgcacccagccaattgtgatttcctttgttgctatgcatgtaactgatttttgcagtttccatggattaaaaaacatgtatttgctaccagatataaaggaaaatcgtggtaaaagtacactcacttcttaagcatatcttttttatgtatgggattttgcttttttgtttgttttgagacagagtctcactctgtcacccaagctggagtgctgtggcgtgatctcagctcactgcaacctctgcctcctgggttcaagcaattctcatgcctcagcctcccaagtacctggaattacaagtgtgtactaccatgcccagctaatttttctatctttttttaagttagagacagggtttcgccatgttggccaggctggtctcaaactcttggactcaattgatccgcctgcctcggcctcccaaagtgctgagattacaggcatgagccactgcgcccagccatgtaggggattttgaattcaactttgaacttgtgttttcttaatacatattggtgtcgaaaattgttttaaaacaaacatgaatatttaagattttagttttttgctcctttctctcacctttctgcagctaagcctgggtgcatccttttttggtgtatcatgcggcagtacatctgggctcctggcccagcctccccaggtggccccatcagaggctatacatctgtagacagaaaagctggtctccttcctttcacttaagacccagaggttgtggtctagttcttgaaggtctagtccttgacccaggtgggggacagtgacctctgagaaaggaagtgaccacaccctgctttatggggcctttgctgaccaaaccctacctctcataatgcttttcgtttgagttgctttgtccctaagtcttcatgctcagcctcctaccacagctggacgtttgtaaagggaaccagaaacatcttttggggaaatgacagttgatgcagatgacagtaaaccataaacttttggtattatcctgacccttagtcctgatcaagctggcactccccagaatgcgacaatatacagacataggcacaaattctgttttcatacttttctaagtacttaaaacctccacagcatatgtcttttgtatgttatacacaagactgtaaagagactggctggggttggacatgaaaagccctacaaagtcagaatcctgccggcctggagcggggtctatccaagggattccatcttaccagtgacattcatagaaaagcacagtaaagcacaggagatccttgctgagttttaattcctcagtctgcctttctgcatcttttgagtgatacactctaataatttgactgcattttgtgtgagtatagctggatccgctttgattctacaaattaggtgcccttctgtttcttagtaatgtcatattctctgaccactgtagccacttaagatagtctcaaatatgaataattttcagtggccatagtggagaagatgctgacccaggaggcttattctcacctccacctcttagactcacatgtatgatttttttttctccctaccaaagtggctagttttgacagcctttaggttgcagaactgtttatattcgaaagaagaccttaccttcatagagcattttcccgggcagttgttctgctttgtgtttttaatatctactcttattcggagtcccaaaatgagttagcttgggtagctctcacaatgaaaactgatttcttcgcataaaactttattctacctttttgaaaaccagctggaaatgatgaatggtggcttcaacagtaatggttcacgaagaactgatcgtgtccccatcaatgaggtcttacccatggcagggcaatggcggtctactgtaattctgtgttggttgtagtaagttgggggaatatcaggccaagaatcaacagagctacgtggcttaggcaggtcagtttctctgtgcctcagcctgctcacctgtgagatgggaataataaacacccctcagaaggtattgtgaggtcattcactaaaggacatttcagtcctttgaatgggtctggaacataccctagtatttttactctacatagaagaaatcagtcctagaatataattagatcggactttctggtcctttaatcactcgcctccttcctaaactggatccagctgcaaatgattgcgttagtctcaggacttcattttcatttgactcagctgatcaaaactgagaccattctgaggcaggagaatagggtctggaggcagtaaacctaagcccaattcacgctgacttcctagaactaaatcaaaaggaaaaccccaactttccacatccaagtaacaaaaggaccagaggctactccctctgcaacccccctttttccacgtggcagataaactctaagtacctttgattggtcccctcccacagccaatgaggctgttcacaggtcaagacttcatttgcatgggagtataactttgtaacttcagcctctgattggttgctttctgcaactaatcagatgtttgcatagggtatagctttataacttcgcttcagcctctggttggtcctctcctgcaaccaatcagactgattatggtccactacttcatttacacaaggtgtacaccaagtaaccaatgggaaacctctacagggtatttaaatcccagaaaattgtgtcaccgggcccttcagcctcatgggctgctcccaccttgtgggtgtactttcattttcaacaaatctctgcttttgttgcttccttctttccttgctttgtgtgttttgtccaattctttgttcaagaacgccagggtgacgtaacaattcaaaccatgaagaggtaacagagcccttcgcgcgtctcaacacgtggtgacgcagctaataacctgtgatgcatacatgggaacaaatgcatagaaaaacttgtcaatgacacggcaaagtaaaacccaaatgaagcgaggtgaaagaatgggctgcagcgcaggcaaaactgcaccacgttacagactgctcgcctgggatggaacggtggggaggtgcgcagacggatggacaagcgcctggcaaaatggatttcttttcctagactgctaatgctactaacagttccctcctcacagggtcgctataacgaggtaacatacagcacttagaagacggcctgacccagaataacactaatgttcacatggctgcgagtctcagaccaaaatcaatagccggtatctactgaaactgcagcaaggcgaaaccacgggaatggcgctccgttgagtagagcaacgcacagcacatcacatcgcatcctccgtagcgggaggctctggcctcaccgcagcggcacttcccggaagagcccaggatattcggggacccgcaccggacaggcggcccaggccccctggcgcccagctggccgccctgttgcagctctcatgccaagacctgcgcctaacggcagggattccggcggtcatcatttattcttggcgctaagctgccgcttctcttttttatcaccacagagtaacgcagaccccaccgtttccttccattctgagccaaccactccagcagccaccggggcgccaggttatgctggggctgcaccacccggcccgaggcttttgaagccacgcctgagcgcggaggatgggcaggatttgccccgtgaactcccgcgcacgcaggctccgcgcgaggcccgggcgcccgagcggcgattccctcccctatcaccagctccagggtggtgccccccggctgtggagcccagaccccggccgtccagcagcgtatagacgagcccatgtctgcgatgtaactgcaccgcgctggggatccacctcccgccagggtgagggcgccgtcctccagcgtatgctaggcaggcgcgccccgccctcctggtcacgtgaccacgcctacagccgaagaggatgggaaaatgcggccctgttcctgaacaggaagcggaagcaggaaggaactgagaacaccagcatctgctgccgccctgaatcagcgttagcatgtggaggcaacctcagcccccagtttttgaagaaggtgattcagattcagacacaggaattatggtgacggtagaaatggactggaaggttcgttccccttgcccaccaagactccagagcaggtgggttcttgatgtctactctgcatgaagccctgggctttccggccctccctacttttcctccgaattcacagcacagcggagccaaaatgtattcctgccaaaacgggcatttcccaaaagaaaatattgttttagattcattgttcacagcctctttttttttgttgttcatttgaagcaatttttcttttttattattatactttaagttttagggtacatgtgcacagtgtgcaggttagttacatatgtatacatgtgccatgctggtgcgctgcacccactaactcgtcatctagcattaggtatatctcccaatgctatccctccccctccccccaccccacaacagtccccagagtgtgatgttccccttcctgtgtccatgtgttctcattgttcagttcccacctatgagtgagaatatgcggtgtttggttttttgttcttgcgatagtttactgagaatgatgatttccaatttcatccatgtccctacaaaggacatgaactcatcgttttttatggctgcatagtattccatggtgtatatgtgccacattttcttaatccaatctgtcattgttggacatttgggttggttccaagtctttgctattgtgaataatgccgcaataaacatacacgtgcgtgtgtctttatagcagcatgatttatagtcctttgggtatatacccagtaatgggatggctgggtcaaatggtatttctagttctagatccctgaggaatcgccacactgtcttccacaatggttgaactagtgtacagtcctaccaacagtgtaaaagtgttcttatttctccacatcctctccagcacctgttgtttcctgacttttgaatgatcgccattctaactggtgtgagatggtatctcattgtggttttgatttgcatttctctgatggccagtgatgatgagcattttttcatgtgttttttggctgcataaatgtcttcttttgagaagtgtctgttcatatccttcacccacttgttgatggggttgtttttttcttgtaaatttgtttgagttcattgtagattctggatattagccctttgtcagatgagtaggttgcgaaaattttctcccattttgtaggttgcctgttcactctgatggtagtttcttttgctgtgcagaagctctttagtttaattagatcccatttgtcaattttgcctttggttgccattggttttggtgttttagacatgaagtccttgcccatgcctatgtcctgaatggtaatgcctaggttatggttttaggtctaacgtttaagtctttaatccatcttgaactgatttttgtataaggtgcaaggaagggatccagtttcagctttctacatatggttggccagttttcccagcaccatttattaaatagggaatcctttccccattgcttgtttttctcaggtttgtcaaagatcagatagttgtagatatgcggcgttattatttctgaggcacagcctctttctttcgtctccctttcctttcctcatctcttgctctaattggagaatttgacaactctgaacctctgactgtggataaccccaactccagcaagcctgggcaagagtgggacagttgcagcccaaggtagccaaacatctgagttttgcctagtaacagatcatggagaggtcagaccaagaagtggaaggaagtggccggcctgaggcctttgtttgggccactcagggttgaatgaaatgataaaggtagccacgttgtctggatgcgcttcaggtaataattattctctaaggaaagcagtcatatttatatccataaaatcagtttattaaattacatagcaatatacatcccaaaccttttctcaaaattgtcattagctttttaaattcgttaaatattttcatctcattaaaaatggtttcttcctttaaaatttcccagaaagtgtggcctctgttttctgctactcagtttaaacacatcatcaaggatagataattaatgtcaggtgagcataaaaggagattataaaccagaaatgtgttttctgggaaccaagtttcaagtgactcagataagttttattaatttcatgggtgaagcccctggataaagcagtgcctaaatcaggcttgtttacccttggcattatgtcaccaaacactgtttcaggatactggaagtacatacagcttgggaggtctttggcctgagcctgttttggccaagcccatccagaatgaaaagtacaaaagaaggctagtgtgtgtgcaaagcagcatggcttattttgaggtcctattagttgtgggccaacaaaacagtggcaggatttgaaggaagaaatgtattgcaatagtccatatccttcgaaccacaaagggagactgaggaaatgctggctttaggccaaaaaaccctggctcaaaacagcttcctccagtggctcagaggcagaccaaattcatcaagtcaaggaccttttcctgctaccaccttgcggagaggggccttcaccagcccaccctgcacatgggtttctgctgttcagaacctacccagtaacaacaggagcaaacatacatgttttcccctcatgtaactttgcatttaaatatattctgggaaactgctgggcacagtggctcacacctgtaatctcagcactttgggaggccaagacaggaggatcacttgagtctaggagttcaagaccagcctgggcaacatagggagaccctgtctacaaaaaatttgaaaattagctgagtgtggtggcactcacctgtagtctcagctactcaggaggctgaggggagggatcgcttgagccagggaggttgaggctgccgtgagctgtgatcctgccagtgcactcagcctgcgtgacacagtttggaaaactgtctctctctatgtatgtatctgttcagggaaatggcagcgtgagattttatggcagttcttgagacttcagaaacacttcggcaccagccaaatccccccaagagagcaaggaacacttttccagttgcttaaaaaatttaaagttataatgaaaaatgttgtaaaaagaactacagaggctgggtgtggtggctcacacctgtaatcccagcactttgggaggccaaggcgggtgggtcacgaggtcaggagttcaagaccagcctggccaagatggtgaagccccgtctctactaaaaatacaaacattagccgggcacggtggcagtcacctgtaatcccaactactcgggaggctgaggcaggagagtcgcttgaacctgggaggtggaggttgcagtgagctgagatcactccagcctgggtgacagactgagactccgtctcagaaacaaaaccaaaaaactacagaatagagtaggggtggagggaagtcatgcatttccagtggctagcactttgcgctctgccttggcgagtatctgcaaacttcctgaccatcaagtgcgcttgcagccatcctggatgtcaactggccacagaccctttgctatggggagtccctggctacatccattagcaagtcagaggtttccttttgtccccatgatgccactctccagcaagctcaaactgctgtcacaattgttttactgtacctaaaaaggaacagataaggcaagagccacagtcaatgttttctgtgaaatggtcttggcaaatagcattaagaaatcttgttgaatttcaaagaaaaggtctgattagaggtgcctgttggaagcagaagcctcaagaaatgaggaaggaaagttaatttgagggtctgtttcatttctgatacagaataatcacaaaaacaagtatatgccgctggctgtagctccccttaggatttggataaccagctggatttccagatggccactcccgttctctatgcttccctcctccgggctatatcctgcagagcttcagcgggaagttctccgtgatgaggtggtcagggtgaagcagcaccacgatgttaacctcaaattctgagaagagaagagagggtgggtttgtgctcactgttaccaagcagcgaaaccacacgccgccaccactgcagtcgcaggaagctctaacggcgaaggagcacccggtgcgggtgggtttcattgctgtcccctcagcgccaccctgacctttcagccaaactttcagtggagatgactatgctgatgtctgactacctctgtcaactttctctaagtgaatttttgtcctctcatcttggaacatgagtgatcaggcttcaccaactacactttccctgtccctttgctttcctaaaaaggatattctagaaccctttcaattcatttgtattcctttgccttatttttacatttcctacggttcttaatgaaatagcagactgtgaaccagcgcatagctgtctgggcccatgtccccaatccccaggtgagaaacagtcttcagaagcaacaatttcattgttgctccattggatactattcatccatcacctttcagcaaacaggattccttctccaccgactcttcagctgatatgggtgagccttgttgatcctaacaaaagggatgtgtgtgaagaggaagcacctgacgacaaacaagcaccatctccttccccagtgtgaggaggggtgggaagggcatcgtgtgggcagagggcaccctgtgctgagccccacactgtggcagctcagctgtggaaggggccttggagtcagtgcccacctgtggctggggtctgcaggacaacatccccgtgtgggagtgtccacctccgcccaaacatcagccacaagaagagtcggccaccagcagtggccggcctgtccttcctcactttattgtcactacattagagtcctctgggcacttcctgccaccactcccttcaatgggttctccacccctcttgttgtgccccccagaagggtggagggtgtggctggagtggacagagagggatgcccagcaggcaagatagggagctggcgggggctttcctttacagcaggaaaacagctgcactggagccgccatgatacccaggcgctgcttagagtccgagtgagttccagtctcgggcctgaccgtgcatttgaggtcactcgcacggaattggaggggaacacacagaggtgctgctcttgatgtggatgcagtgctcactcctgacttccaacctagaggtccccgagcctctctgaatcacagtcccctgctactgagaaggctcggtcccttcctactgggtctctctgttctacttcttcgtagtgtggagtgatctcccaattaacatgattcttattaagatggaggtcccattacaatatttataggaagagttaaaaacatggaaatgttcatgatacaatgttaagggaaaaaggcagaatataaaagggtgtctgtgacctgattcagatcccatggttaaaatatgaacacacaggttcatggaaactcactagaggcatctaggccgcggggctcaaggccttcctgcttctgagcgctcactctggggttttcacgggtcctggaccttcacacagagccactttctcagtatccacaccaccccccactcctgtggtgctcgttcacgggagttttcttcacggagctcagcgtcacctgcccatgtctacacagagctcagcgtcacctgcccatgtctacacggagctcagcgtcacctgcccatgtctacacagagctcagcgtcacctgcccatgtctacactgatgtgggtctgtgtgtttccccatgtgacagtggaagtcccacaagcaccaggactgcctgtgggtgtgtcccctgtgcggcacagcagctccttaacaaggttttgttgagcagccgaagggcagcaggctctgagctgtatggcctgtggcaggccctggcactgagggaccgaagggcggcaggttctgagctctgtgacccacagcaggccctggcgctgagcggcccttcccatgggcccatgagggctgggaggcgagtgccacttacccactttgaagttggtggtctccagtgtagggcaggtgaacagcctagggaagaccatgtagatggggacagagaggcccctgcacacatccccgtcggcgatctgaatgttctgaatctccgtggcgtcgcgggcatagccttctgcacaccctgcgggagggaggccacatcacgcggtcagggccagcagaggctgcggggtccacatccgcaccggcaccacccaccagtctgctccaagaatcctccagggtcccctcccctcactttccttagacacgcggctactgctaaggcacagccacgctcttacttttgcttccccgacgtcctctcgttttttagagtcagggtcatggtctgctctgctgcccaggctggagtgcaatggtgcgatctcagctcactgcagcctcaaaccaccctcccacctcagcctcctgagtagctgggattacaggggtgcgccactgtgcccagccccccagcatcctcttaaccatggaacgtgagggtggcagtcgagggggacaggcaagcgccaggcctggtggcacggccctcaccgcacgtctccacgcgcaccagctgcagctccacgcttctgatggcggcttccgagctctccaccaccagctctcccgttagtggctgcgtgatgacacagtttgttgagttgagatgtcctcgaaggagaaatttgggaagcaaagctctctaaaacaaaatgaaaacaaatacatcagaatgcaggcaaggggggaaagtgctccatactttggtgcaaataaaacctggaagcgaagttggatagtggttacacagtccaccgggaccgtctcacaaaacgggaagaaaggagcgaagtactgacgtcttggacattagccggctgaattattcaacgactctctacatatggcacctgactgacactctgtgtacagagaatgcctcagagaaccatcctaattgcctagtctcagagctagaaagctccttcttaccaaggaataagacatgaaaaagtctgagggagtcgccatggtgttcaagacaacctgacacacacacagttaaaaagaaaagtcctggccaggcacagtggctcaggcccgtaatcccagggctttgggaggcaaaggcaggaggatcacttgaggccaggagttcaagaacagcctgtgtaacacagcaagaccccatctctaaaaaatgttttaaaaattagctgggcaggctggtgcacacctgtagtctcagttacgtgggaggcagaggcaggaggattgcttgaggctccagtgagcaatgattacaccagtgcactccagtctgggtgacaagaatgagatgctgtctcttaaaaaaaaaaacattcaaagatgttcccaattgtacaatttttaaaacccaagacatttattttatttcatggaaatttgaagaaaactagtttctttgacgcttgatgagaagcctacaaacctttactctgcacacctgacgctggccaggaaggactgatgatggtctagagcaggggtgtccactcttttggcttccctgggccacgttggaagaagaagaattgtcttgggtcacacataaaatatattaacactaatgatagctgatgagctaaaaaaaaatcacagaaacaaaatctcatgttttaaggtttatgaatttgtgttgggtcacattcaaagccatcctggccggtgggctgtgggttgaatgggcttggtctagacagagacaatttttctaggaatctttacctctggctggatcccagttactgaaaggatcagatattggcatactactgtccaacagaaacataatgcaagctgcgagtggaagccacatatataatttggaattttctggtagccacattaaaaaagaaggtaaaattaacgaatatatcaaaagtgttatcacttccacatataatcaatatcaaaaatatgaatgatgttttacattcttcttttcatcctgagtctttgaaatctggtcagtatttacacatccaactcagctacttggtccagccatgtgtccagggtcaatggtgatgtgtggctggtggccacctgatcaggcagtgaagctctggacctgaaaagcccgggactctggacctggcagtccccaaaggtacagacctctgaagaagtctgcattcaagatggagcttttatttatttgtttttattataaacatttttagagacagggtcttgctctgttgcccaggctggagtacatggctcactgcagcctcacctcctgggctcaggcaatccttttgcctaagcctccctagtagctgggactacgatcgcatgccaccacacccagctaatttttacatttttcttttgtagagacaggttctatgttgcccacgctggtcttgaactcctgaccttaagtgatcctcctgccttggcctcccaaagtggtgggattccaggcatgatctactgtgcctggccaagacagagttttaaaaataactaagagaagctatttgtgtagaaaaacaaaaagcagtagcagtacacattaaaattcttttaggcgactgatgaaaaaggatagctttcaacattcagctcaagatactgactaaacaatcattttccctctcctcccactgacatgatattaacatatacaaataaaataaacctatactattttgagtctgagctccagcctagtagttcctgtaaagctgtcttatatccttccaataaatctcttttctacttaaaaatctacaagattttctacaatacatctcttttctacttaaaaagcaaaacaaaaaaccaccagtggcattttgtgaataagcaattttattttatttgctttatgtgttattttcttattttccaacaataaacctgaatggttctgtggaaagaaaagttcttcgtgtttacaaataaacctatacctagaaaagccacaaggaacgccccgtggggaccaccccagtgaagtgtttctgtccggcagaaagtggacagacaatccggctcccgggagttcggggcacccgtcctccaggtggcagggggagcggtgagagcgggtgtgctcgcagggcgtgtggtcagcctgccatcgggcgggggcctgcgaagggcagtaggcaggtatcacaggtgagctcaccagatgggggaagctgccacagactggcaccacagcttcctgcaaaggggatctcccacccggaaaagcagactcggggcaaggtaggacaagtgtcccacgtcattcacagccacaatgcagacagcgagcctctggactcaggagacaagctgcctacaaacaccccggccacgtgccacacccagggcagagcgcctctgatgagcaggtgctgaggaccaggagaacaggttctcacctgggctaaggatacagcctctacaacaccaccacacacattagatcctcatttgtaaatgtaaactgacaaccgaggatcaatacacatttaaggaaaacaaaagcaagaaaaagacacacacactcgacaaacagaaccaacccctgagaaacagaatcaatacaggaaaaggagatgaaaggccactgcgtccgtcatggaagcagcagctatcccgaagaagaaacggtgtctagaaatgaatcacattactgctgaggtcagcgcttccgaagacaggctacagaggtgggagacgggagtctgagtggcccactggggtcgcgtgccctcagagcccggagaagggagacgtgcagaacagacagaggagtggcctttcctccctcacctgtctgaaaggctccccacgacacatgtccagcctctgagggatgaggccaatgacatcccagggcccaggcctcccagcttgtccttcacttgatcctagtcagtgtggtccagacagcagaataaagaattagaggaaggatgaaaagttacatccaggaagaactacaggactccactgtttaggagaaatgcatggcagtggatgagagggcaagatcagggaggccggggccaggcagagttttggacgggcccaagttcaccgtgcagctcgagggaccagctgaggctccaccagcggctgccactgacagccagacagccctgtcctgatgcaggaggcgggggagctgggctggcactgcccaggcgtctgtgtcctcactgtacctgccctggccgtgaggcgtccaccacggagggcactgcggaatctttgaaaagcacgttgctgcccggcctctgtctgatgggaatgctggggaagaaactgcaaactaaacatccatggaggatgacaacaggccagggggccgggcgcaggccccggctaaccatgagaaatgaagggacgtggccgtgtcatgggcagcagggggtcttgggggcccatgatgcagtaaaactgagggaaaatggtgagattaatagacatggaccctccctgaggaacttttcaaaagcagtcctcttctaagctgctttactgagcttaaaaaggaaatcaaatggaaaatactgagtaatttgggtacaatcagaaatctctgccggctgatgacgtgatttccaaatgaagaccacccgggcaatagctagtccgtggggtctggctgctgggaagatacccacggcattcgcctgtgcaggacgtcttacctctttgacgttctgtaaggtttcaggtgtaatcgtgaagtccacgggactgggagtaaacttccccttctgaggctaaaacgagaggtgaaaccgaaatcagtaggtgaaggccaagagttctgcaggtcaaatagcttttccctttcaaaaataaaccaacggcagcctggcgatgcaggaaggacggggaactaagaggcgcaagcctgggtcctgaacacagttctgtcaaatttccccatcttgctgaaactcagtttcctcatctgtaaaatgaggggagagatgtcttaatctccaacgtgcctttcagattcagaattttaaaatcagatctaagaaacagaacagtgttattggcaagtacttatttgaaacctcagcacagtgaccctccaaagggctcttcacacctcccagatggtcccacttcacagacgaggcaagcggggcagagagctcagtggcctgctcagctcagtggtggagctggggggctgagcattgaacccaggaggtcaggttgctattggcctctgagctatagagctgtcacctgaagaatcatactttaaacgttaccaaaacagcagtaacagtgatcacctccatgttacataatttcagaatctacagatacagccgagcttcatgagagcctgcctggcattttttatccaggggctgggatgcaaagggccagtctaccatccagagagccagggggaggaaaggtcctgcctgatgtgccgacgtggagtccctctggcccgcggcctcagctgggggactctgggcccaggacaatgatgcacacgtgatgcgcatgccaccgactgtctctgacccagaagtcttgtgtcttctgccagcacccgtgaaacagtaagaggctaaatggtgagcttgtaaatagggtaaactctcagaccccatgggagattcctatcattaagcaccagagtccccgagtgaagcttacagcggagtgaacgataaattcacaggtctttgtcaagtccttggccaacagagaccgcttcatgtcacagcgcagtgtatactaaaggggagagttggaggaaaaaagttcattttagtgggatttgctttcatcttggaattatattcaaagagacaagtcagtcaacatattttagggaaatgttgtacaatcagtgcattatagaaaattaacatacataatataatacataataggatagttaatgttcaaaataaaggcatttctgttttaaaaatgaaccactttaaggttattcttcaatctgtttgcacagctggcctgcagttggacccactggcaaacaggtgcacggtcccacctgtagcagggagcaggctggcgagacagaaagggcagtgcgctcaggagcagacgccaggccagatcccgttgttgtctgccttactgtgcgagcccagacagataacacaacttgtctgagcttctgcttcccttctgtagaatggggctcttaagacccacctgcagcgagactccaatgagatcatgtgtgacaagcactcagcacagggctggcacaaagcaatgctggaaaacagcagctactttgtaagcgggattagaaaatccatgcagtgaggactgcaaccctgggacagcacccagcatgtcacaacccttcctcgctgggcacctgctctgagtgcatagcactgccctgggcaccagagccaagctcaaggtcacacctggtcctcagggaacttctagtttactgaatatgcagtaacccacacatccatcaaccaacttccacaagggtcaactcatggctaatcttatttctcgagacatctgaggtctctctccatctgccaacacacagatgtagcctgcacctcaaagaaaaagtgggttggaaaacaatgtagcatcgcacttgcacacttgcttttttaatgtggcagagccgcattccatttctctgctgtccctaggttagttttctgagctggttgctaccatggtgcctactgcaaggtgagctctattcccccaaggggagccccactgcagagctggtattgagcttaaagcaggctttgaacggagactgttgcttcaaatccctgtccgtgagctgagagactatttaaaaatgtaattctacagcaggaccactgttgtaatgccagtctttaaaaaaaaatcacataatccacgtttaataaagttagttgttgttttaatcgtccaggaaaaacttcagaattatgtcaaaaataattttcataactcggactctatgcataactgaatcttccaagaagctaatattcgtatgaacaacctgtccgcatgaaataagaagttactatatatatttaaggtactactgggagagtaaaacattgtttaaaagaatcatccttgtctgcaaggatctttatgtagaatatatatacaatatatatattctttttttgttttttaatacggagtctcactctgtcacccaggctgaagtgcggtggcgtgatctcggttcactgcaacctccacctcctggtttcaagtgattctcttgcctcagcctcctgagtatctggaattacaggggccgcgccaccatggctggctaatttttttttttttgagatggagtttcactcttgttgctcaggctggagtgcgatggcgtgatctcggctcactgcaaactctgcctcctgggttcaagcaattctcctgcctcagcctcccgagtagctgagattacaggcatccaccaccatgcccggctaatttttgtattttagtagagatggggtttcaccatgttagtcaggctggtcttgacctcaggtgatccacatgccttggccttccaaagtgctgggattacaggtgtgagccaccgtgcctggcctaatttttgtatttttagtagatacggggtttcaccatgttggccaggctggtctcgaactcctgaccttaggtgatctgcccacctccgcctcccaaactgctgggattacaggcgtgagccacggtgcccagccctgtccatagttttaaagtagattcctataaaaggaatttttaactttgaaaagggatgactaggatctctagaaatgagtgctgaatatacaatttcagcagacatgttttatgtgataggataaacgcttgctagcacagctacaagagtaaagcaagagtagaacaaacctaataaaacttgcctacaatttaaattattgtaaaaagaagaagtagatgcacaaagggcaactacggaagactctgatgatcatatgaagtatctagtaacaaagacaaacatgaacgcaacatgactgagaagaatgtcaagctcttcatctaaaaaatgacaagaaagccaagcctctggaagtcaggaatataatactggcatttgatacatatacatatatatgtgtgtatatgtgtgtgtatatatatatatatatatatatatatatttttttttttaattaaaaaatttttttcttaagagatgaggtattgctatgttgcccaggctggacttgaacttctgggctcaagtgattctcctacctcagcctcccaagtggctgggtttacaggtgcatgccgctgcacccagcacgtctatcttttaaatcctttattctgatttatgatttttaccgttttagattgttacaacacaattcaatttatgaatgaaaaatttcttggcacataatttaagaaagatgatattagggtttagcaacaaaagtttctatccaaagaaatgtgcctatgttaacctttagagtaagtgcggtaaacagtgcgggccgaggagtgctggtctggacccgcaggctgaggctggcctgtgtgaccacaggaagtcactgccgtctctgggcggcacttgctctactataaaactgtaagaaaaagacctgccaaataatggcatgaatgaatgaatggatggatggatgatgacagatttaaaaaaacataatcttagtttctcttaaatttattttctcaaaagacgacaaattttgatatgaatcaagaattaatcaatacttgagaatttttacaaattctgataggtgtgcaaatgttaactgtaattatagagacaaacgtccttagtttttggagatgcgcaatgaggtattttgagatgaagtatcaagactctgaaactaactttaaaatgatttagaaaaaaatctaaatttttaggtgaacaaagatggcaaaatactattaagtgctgaatgacaataagtgtgataaagtcatggaaatcagaggttaagctaagaaatctcttcattgttagaaatcggtgagatagttggggaggtactgaattccaaattgtagtactctgaggttaaccctcaaatggtaaaatctgatgatgaaaagacgagggtaggggcaattattccctttactaaggaacccaccacctgttaactctcctactatattttaagtagcctccaatgtacacacagctctgcagcaacagaagcacacaagctttttgttttgttttcttttgtagagatgagatcttgcgttgttgcccaggctggtcttgaactcctgggttcaagcaatcctcctgccatggcctcccaaagtgcagggatgacaagcgtgagccactgtgcctggccagcacacacgttttctatgtatatctgaacatctgtcttggcaacatgtggaaaaggatggggtttccaatttgactttaaacaaattcatcttcttttggtaagtcttgatgaacgcaggagttaacaaatatgatcactgaaaacgtgatcttattccagtttctaatgaacatattcttgtatttttaaatcaaccatattaaagaactgccgtgtggataaagcaagtcgatactgattctgggtagataataaaaataatttccaaaatcaatgttcaagatatcttcagtattgccaaaaaggcatttttcattcagtttctttcagggtggaaacagtcccaacctagaaagctgatcagaagactcccacccacataccagcaattggtatctgcatggctacgtacgcagcttcctctgaatccaggtactactcagtcatcactgctgcttccttggggctgtccaaagcctttggtgctaacaataaaggactagaaacacttcttttcttcacagaagatgtacatcatactacatgtgtttcctctggacagatctcttaggcaattcataaaactcccatacagatgaatctttaaacactcacaggggtttggggggcttttattttaaaggttctattattttcagcaggataatgtatctactaaggccaaattattgaccaaaacttaataaatcaaaaaaattcctgactttcatccctcttgcatataagactgaagagttgtgtctcatccagcaagggaagtgctgcgaggctgctatcacaaaagtatctttctttctgctgcataaaggaaaggctatctcaccccgcgtggactccactgctcctgagacaacaacagcagactgtcaaagacgtcccttaaccagcagaggtagacaggaagtcataatccacttcccctcattgacaaggtttgttcagtaaagaacaccagcctatgtcaaagtagtagcctttgggtgttaaacaaagagatacttgtaagtataaaacagacaagttaatgctagtgccagaaagaagttagggcatatctgttaccagacaataaaagcatcccttacaatgtgaggtggcctgaaaagagcccagaagaaacagagggaaaagaagttacagcacgagtgccttgaggctcccatcagaaataacggccatacatcaaatgcatttatcagggaaatgagaaattaacgtcgaatatacatgcgaggtctcagcaataaacacagtattaaattcttgggcccgtctactaacgttgagagaaagaccacaccgtttgtcagaagaaaacttgtgaagtcagtcgcgtaggactaggaagctctcacctgaatgttgacaaacacgccatgatacgtctcatacagaactttgttacccttcaagtgcagaggaaattcaaaagggatttctgttttgccgctgggaaatttccccggcttcaccatttctatggtgctgttgataatctggataggctgtaaacaaaaatcagttcagtccatcagcacacacttggaaatgtcctttccaattactaataacgttctgaaggacacagcaccccgaccccctggaggccaccatcctgctgtcttcggcagctctgcgctgggtctggagatgaacagtgacttggctctgctttttaagactctggcacaataatgattcatttacaacatgagacacataggtgcttgagacacatgggaactgaactgatacatccctctctcctccccaggtatctcatttaactgttttaacgaccccgatcttcaggatcaagaagcagacccagcacagtgaggctgcctggctaacagggttgacgtgtgaacccacggctccccctcaccgagccccgtgctcttctgggcagcgctgcctctgctcctgacagcccaccagcttcctcggagccttcctgctgcagccgctcagggagagcaggcctttcctccagccctgtggcctgcacagacctcctcagctgggcctccaaggaggagcaggagggtactaacatttggaacctgccttcaaggcacgtattcatgctttttaagcatttatagtttaacatcagtggctcggagaagacccatgacttaggaagtgaatctcttaagtactaatggattaaaataaagttgtagaaaacataggaagcccctaaatctgaacactgtgaatgcacctttctctgtcttcactcttttccctgcaaaacttaaagcgttaatatgtccttcaggaaaaggcaactacaagaatagagaaagagtttacattctggaacacaaaactctaccctaaatgacaaaaacaacagttacttgctctattttcatcttaccttagtgtcaaatcaacagtagcatagacacagctaataaaatgacagttttgattttggaaggcatgtaacataagccacaggcacaacttctcagaagagctgtgatcttttttttttttttttggagatggagttttgctcttattgcctcaactagagtgcaatggcgccatctcagctcactgcaacctctgcctcctgggttcaagcgattctcctgcctcagcctcccaagtagctggggcacacgccatcacaccccgctaattttttgtgtttttagtagaaacggggttttaccatgttagccaggctggtctcgaactcctgacctcaggtgatctgtctgcctcagcctcccaaagtgctgggattacaggcgtgagccactgcacccaggtgtgatctttttaatggctgaaattaatacatttatagttctcctaatcctatttatcaaataggaataaatataagcagactttcaataacaggatatacttagaaacaaagtatctccattttcgcaggttgattagtaaatatcagaagtgtaactaccaccatcccttgcaaaataacaacagataacaataaaggcacacagcaagtgaaacccaccataaacatgtctttttttaagagacatggtatcttgctctgttgctgaggctggagtagagtgctgtgatcatagctcactgcagccttgaattcctgggctcaagggatcctcctgcctcagcctcctgagtagctgggactacaggcacgcaccaccacacccggctaatttttaaagtttatttatagagatggggtcttgctatgttgcccaggctactctcaaactcctgggctcaagcgatcctcccgccttggcctcccaaattactgagattacaggcctgagccactgcgcctggccctgagccactgcgcccagcccaacatttcaatattgaactaaaaacttgcaatctaagcattctttcttaccttaacagaattataaaaagcttcaaacacacccacacttttggcactgagctggaggtttacagttccttccatggtcaaagacactccctggtgttggactgaatccttactcgatatgaccaccacgccagagagcacttcctgggagagaaaagacagccaccaatcaaattagcatgcttcctccattctaccttgtttattagcaaacgtaggtctccttcatcatcaatttgtttaaagatccagacattcactgagacacctggataccagggtggagaaggcccaggtcctggtaggggacagatgcccactgataatgacgtggcagcctggacacacctgacggggagcacccgggtgtggggatgagaaacctcgtcccgtcactgcctctcagacatgtcttcattcctggttggggaatctcaacagatgtctgaattcaagagtgcaaggagaagggccagggcaaatgtaagttcccagtgatatcacacatgggcatggatgaggtcccttcaaaaggaacagaagaaaataaaactctgttcgttaggctctttctcaatagcgctgactaaaatgacagcacaactgcaaatgcatgagtaatttaacacgatggttagcctggtgtcctttctgcccagaaatgcctactgtgagcaagactggaggttattggtgccacccacgaggcagcagcatgccactttccagaaggactgccctgtccctgtggttcctgctcacaccaggaggcatcggcgcctccattcccttggttcacacatcatcgagagacttcacaacagatcatctgtgcatttatctgaagataattactgagtaatagattacggatagtaactgcattcgctattggagagcagtttcttcctgtcaccatagaactggatggtctcaatctgttacaggggctcgagtggaagaggaaattgaggggatgaaatagtatcaagcggaacagaaagactgaatccacaatccacacagaacaacacgtctcaggctgggcgtggtggctcatgcctgcagtcccagcactttcagaggccaaggtggacaggttgcttgagcctaggagtttgagaccagcctgggtaacatagcgagactccatctctacaaataataagaaaaaaaattagctgagtgtggtggcacccacctgtggtcccagctactggggaggctgaggtgggagaattgcttgagcctgggtggttgaggctgcagcgagctgtgactacgctactgcattccagcctgggtgacagagcaaaaccctatctcaaaaataaacagtaaaaataaaaattggcctgcagatcaaaccattaaaaaacatctgtcctactggtgtttaaatctgcttatcttttatttcttctagttatccagtgaaaaatttttaccaagttcttactttaacttgaattttggaagcaagaaatattctatgtcccttaaatgtgctaagtattttgtttttgtttccactccccatcccaaagccttgaagtctaattaaaacaaacacgatcatctccattttaagcaatcttaagaataaaatgagttctccttgaattctgcttaaaatggagatgactgtgtttgtttcaatgttaatgtttaatgtttaatttaatgttcctaaaaaattcctaagcagacttaaataaaaattcctgtgaagtaacttaaattctaagtttaattaacattaattctattaattttttgtatagcccaaattcaaatggaaatttaatattaaaaattcaggccaggtaacatggctcatgcctgtaatccagcactttgggaggctaaggcaggaggatcacttgagcccaggagttcgagaccagcctgtgctgcatagtgggactccttctctacaaataaaaaaattttaaaaattagccaggcgtggtggtgtgctcaggaagctgagggcaggaggatcacttgagcctgggaggtgaaggctacagtgagccatgaatgagccactgcactccagcctgagtaatagagtgagaccctgtctcaaaaaaagaaaaaaaaatttaaatccactagtatattttttaaagtttacttgacgaatatgtcccacaaataaatgagacaaaataatttgtgagctttatcaattgaaccacacagtagcgcctgaggatggtcccgttcctatgcagtcataaccctttccgtcagtctcacgggaacaggtctctgggtctccctgatgggcatattctaactatgacatcagtaaagccttttccctccttaatccctgcagcgtaggaggaaaaaagtagtgacatacctcggaagtaagcagagtaaatattttatgactcgagacacaatatagtacagaaaatacaaaattaacatttgtggataaattagatattcttataatatacaggtttattcaactcctaccaatgaaagaaggatagggaattagcccacctgaggccgagggccaagggatttagaaacaggagacggtttaacagagaggcaagatctgtctacacaatgcttgattgatcctggcagaggaagataggatacactggtagaacagacattaaggaaaacccaagatctcaccaagaacttctccctcagattttcgtctagactttcatcaggaagacataagatttatggctccagatagtactaatacctcgtccaacatcacaagcagaggccttcaactgggggccgtgactacaaagagggaccgttcacagactggcaacgaacccagaacgtatacaccgaaatcgtgtgcagggtgctactgttttgggagaagagccgtagcttctgtctcatcatggaggaggcgcctggcctgggaaaggccatattgtcaagtgggaggaggaagaggcgcagccccgtgtggtgtgcgtgctcatcagagaagccagcacagacactgggacccactcgcgtcaccaagagccaacccctcttcagggtgagtaaaggaaagagctttcattggaggaatgtgaatacttttcagttatccagcccagagacactgaaaggagacggcagtcccgtcctccccttctctgggttgtgctcatctctcgaaactacctgcttttgccaccagcagctaagctataaattccctcaatcacaccccatccgagactacagcccgcaccctagagcttaacaatggagagccaatcgcccatcaatgccatttctgtaagcctatgagaattcctggcaaacaactttgtatcaccccactccgtgtccccctttctttgccttaacaacctacttgtaacacaggggaacggagttcatatccagggtcactgggtctgtatcttctgggcagctgtcctctctttggctcgagtcagctctttattatactttgtgcctcagctgctttgctttagatggacagaggccatgcacccaagaaccacaccactcagagcctgcttcgaggggctcctccaagtccctgccctggaggagctaagtctggagagaggcctgaagctgcccatcttcaacctcagcccaaagagccgcctggaaacaagcattccaaaggctactggccaccttgctcttctcagctttgctggctctcacagcggaaaccactggcaagtttgttcaaaggggggcaaaagcaaccacattttctaactttgtattctcttttttttcctcattcactctgtcacccaggctggagtgcagcggcacgctgcaacctccgcctcctgggttcaagcaattctcctgcctcagcctcccaagtagctgggactacaggcatgcaccaccacacccagctaattttttgtattgttagtagggtttcaccaatgttggtcaggctggtctcgaactcctgacctcaagtgatccacccatctcagcctcccaaagtgctgggattacaggtgtgagcacccagcctaactttgtattctctaaatgtaaaaggccactaccaaactatacaactctttttcttatttgttctctgtaataaaatgccaaaaccataattggaactctggatttgaaaatagtggcatcaagtccgcgacccctcttggcttcctggaaatcacccaaagaatgagaaccaaaaccacaaactgcattttcggcgaggcaaggagatagctaaataccatgaaataggtggaagagctgttaaaagaagtgaagactgagcagggggacgtgatgaaaaacggaaagaaggcccccagctctgcaaacgtgcttcttctggaaagtgagggtacacctgggaacagctgaggccacacccagagaggcatcctgtcaacccgccccatgctggaagcagtcggtctctgcagtggtggagacaatgagcccctctgcaaggtgcaaacgccctgcagctggttactgcatgggctcatgcaaagtcaagatgaaagaaactctcacgtaaatcctccggctattagaacactccagccagcctggtctaggaataaattcatctcctgcaaggagaggttaaaaggaaccagcagaggagcacatgacatctaatggattaaaaaatgagagtgggaagggaaaggaaggaggggaagtgaggaaggagagaaatacgagtggcagatgaatgcgaaagccaggtcaggtcactgttccacttagatttttcagcagctcaccatctcaagcacacagtaagagccacagcagcctacaaagggggacccgccctctccttacctgacggccctcatatggggccctctgctccctcgctcctgccctggcccccttgccattcctttcagaggcctgcacattccagccttaggcaactgcccacgttccttgctccacctgcttgttcttctcagatacctgcaggactcggttccgtgagcccacatttgaaactgtactactccctccctagcactcattatcccccctccctgactgactgcgctctgtgacacttacaccttccaaaataagacaaaagtgcctccctattttatttattgtctgtctcctgcccctgaacataaactccaccagggcagagtgattggcaacagtaggcattcaatgaacatttactaaatgaataaacgatcattcaccagaagaaaaatccataccatcaagcagatgaaaatggtgaatgtgcatttcaccatgaatttgtaaagtccgatgagacaattgcttctataaaggatgaacacaaaacagagctataagagctcagggaggaaatggtgaggcaaaaggaagagataaaaatataggaaagctcagaaaagaagtaaaaggaaaaaatcaaaccaccacagaaaataaatttaaaagggtctaaggatatatgcagggcagaaatgacaaaatccaaataaattaaatgaaaatttaagaaagaattcaaaaagaaccacaaagagataaaattggagacaggtaacaaacacacagctatgcctaattaagttccaaataagaaaactgaaataatgaagcagaacaaatatttactgtgataattcaaaaacagtcaagggcaaaggaattaggagcactcaatgaaaatactctgtagcaaaagtgttctcattcaaaaaagaaaatatccttttggagtcaggaaaaaagatcgagtcactcataagaggaaaagaaaccatatttctccatagcaaaatggaattcaaaatgcaagcagaatgatacaacaatgctcaaggcagtgaagtgtgaccctagaatttatactcacctaatctgtcattccagtgtaactgaaagttttaaatgtgcaaaaataaaaaaacccaaccaaactaaaaaaaaaaacatatcccaagcaatactatataaaagtccttcttgaggaatgtactaaatagtaaactatagctatccaagagatggctagaaaaactatgtcaaaagaaccaactgtgaggattaactccatttaattgtaagaagaagactgagataagtgatgattataatgaaagaagagaatgcaaaatataagtcctgacaatgtagaatgtaatcgacactagctgggagactaagagaactagaatctaggaagtagtataatgtacatggctttcccatctttgatggctgggatttaaaaatgtattattcaaaccatacttccatacttttaagacagggtcttattgtcacccaggctggagtacagtagtgtgatcatagctcactgcaacctccacctcccaggctccagtgatcctcctgcctcagcctcctgagtggctgggactataggcacacaccaccacacccagctaatttttgtattttttgtagagatggggttttgctgtgttgcccaggctagtcttgaactccagggctcaagcaatcctgccttggcctcccaaagtgctgggattacaggtgtgagccactgcacctggtctacacttttcagtatggtagctgtaagccatatgtgactattgaaacttaaacttatattaatagttaaaattcaggaccttccatttcaagtgtttaatagccacactatggccagtggctatcataagagacagagcagataagaagtacattcacatcatcacagagagctctactggacagtgctgatttaaagttaataagtcaaataatgtcgtacaaataaacttaacagaagtaaacaacgacgaatactataagtaactaagatcaggtagtagcgggaagaaagggaaaaggaaagaggaaatatgctaatttaccattgttcacagtaggaaattaataaataatgtctaaaatgtgaagattcaggtacaataaaaagttgcaagggtaacagttaaaacaaaaataaaactccagatgactagaaaatcatacaaacaactaaagcaaacaagacagactgtaaaaagatgtttcaaaagctacttaaaaacacattccccccaaccaagcaggaatgacagaattaatgccaaacgtatgtcatattaacaaatgagccaaattaatgcctattcaaaaacagacatgaatattccattacaaggcaaaacccaattttatgttgtatgacagagaagcacctaaaatggcaggggtggatttggagaggataaaaaagaaaggataaacaaaggcaaagaaagaaggcatggattgtcaccttaatatcagacaatgctgaattccgagaatgaaggattaaacaagacaaaggggactttacaattctaaaggagcaactcacaataaagacttgtgaggccaggtgtggtggctcatgcctgcaattctagcactttgggaggccgaggcaggaggattgtttgagcccaggagtttgagaccagcctaggcagcatagcgagaccctgtctctaaaaaaagaaaaagacgtggtattattatctgcagatcaaacagtgtccacacttgtaaagcaaaaactacagggaatagatttaaggagaaactgagtaaaacaaattcgttgtgggagacattaatttacagatcatgaccaatagagtagacagaaagaaacaaggatacagaagacctacgtcacatatcaacagggtataatgaactggcatacatagatctctataccctgaaaacagagaatatgctcttttcagtgtccatgatatacttttaaaaactggccaaactgatcccttaataagtccaataggtctttcttctgggggtggggggagggggggaacaaagcaaattattaaataatctaatcaaaaaagaaaaacacaaatatccaaaataagaaataagagcagaaatactagaaaaatggaggtaattaaaagataatattcaacactattcaactgtatataagtaaatttgaaaagctgactaagtgaattatttttctgggaaaatataatttatccaaaatcactccaagggagacatgaaatccaagcaaatcaatcatcatagaaaaaataaagttctaaataaggcccccaaacccgacagcttcacaggagatcattccctgaatttttctgtgtgaagaacagaaaattccactataaaactattagaaagcaacgaacttaaaaaaaaaaaaaaagccaacataacaatgacagcaaaataagacaaaagtctacacactcagagagagagacaggagagagaagagagaaaactagattattctcatttgtaaataccagtgcaaaggtcctaaataaaatattagcaaatgcaatccagtagcaacttaaaacaacactatacataaccaagtagaattcagtcaaggaatataagcatagtttaataatgagaaaactggtaatacaactcatattaatagctattaagagaaaaattatatatagtcatctccatagatgctgaaaaggcatttgaaaaaatttatgcattcttgataaaattcttagtaaaataatagaaggatgaccaaatatatctaccttaccccaaagccagcatcaaacttaatgagaaaacaagatatcatccatttaagtcaggaataaaagaaggatgtccactatcaccacaattaacgttctgcaagtactagttaatacaataaaactagagagagaaagaggtaattcaaaggcaggaggtaaaatgatcactacttgcacaatgagtgtatacctgaagaaacccaagggaatccactgaaaaactactatcaacatgaagagagtttcagaaaagatgacagctgggtacaaaattaacacagagaacccaataggtatcacatataaaccaacaactagtgagaagatacaatggaagaaatggccttattttcaaaaggaacaaaaagttaaaatattataagtcaatttcacaggaaatgtctaaaactcccagatgacaaaacttaaaacatgcctgaaagccacaaaagaaaatttgaagaaatggccaaccatgccagattttgaatgggaaagatttaatgcccttaacaaatctactttcccagaagttggtttataaaggcaacctaatcttaaaagaaaataacaccacaattgtttttcttttttgagggggagatggcgggagtgggagggatacactagacaagctgattctgaagtttatatgcaatgataaatctgaaaagaaggaaattggagaaactagccctgtgagatattacaacgctgctataatttacaaagtgtcatacagcacacatgttcaggctgaaagatcaacagaacaaaagtctagaaatagacccagacagtatgggaagctaatgtttgataaaggtagcatttaaaatccttagggaagagagggaatattcaataagtgatactgggaaactggccagagaactcaaccaaaaaaaattaagttgggccgggcagggtggctcacgcctgtaatcccagcactttgggaggctgaggcaggcggatcacctgagatcaggagttcaagaccaacttggccaacatggtgaaacaccttctctactaaaaatacaaaaaattagccaggcatgatgatacatgcctatagtcccagctacttgggaggctgaggcaggagaatcacttgaactcaagaggtggaggttgcagtgagctgagatcacgccactgcactcctgcctgggtgatagagtaagactctctcttaaaaaaaaaaaaaaatcaagttggaccatactgaaactttttgtgtatgacaaatgtagcaaatacttaaatgtaaaaactgaaataataaaagttttggacaaaaccatagagaataatttttttcacatctaagtgggaaaggcctttctatgaatgcctcaaaactctgaataaatatggccacaaatatgactatgaacaataccactatataaatgataaactaggtaaaatacctacaacttaatataacaaattagcaaagggctgatttccctaatattttaagaatgcctaaaagaaatcaatgaaaggctgggcgcggtgctcacgcctgtaatcccagcactttgggaggccgaggtgggtggatcaggaggtgaggagttcaagaccagcctggccaagatgttgaaaccccatctctaccaaaaatataaaaattagtcgggtgtggtggtgcacgcctgtaatcccagctactcgggaggctgaggcagaagaattacttgaacccgggaggcggagactgcagtgagccgagatcacaccactgcactccagcctgggcaacagagtgagactccatttcaaaaaaaaaaaaaaaaagacatcgatgaaaaagataactcagaagaaaaatgaaaaaaaaaagggcaaatgatctgaacaaagagctcacagaaaagggaatgcagattgttcctaaacacagaaaaatatgctcaatttcaacaaaaatatgataaatagcaattaaaacaaagataaaaaaatgtcattacattgtgttgccagaggggaggcaataagccttctctgcattgctggggataacctgaaatgttgcaacctcgtgccggctatttggcaagaccaaaaacattttacaaacacatgggcccagcagatacatttgcagatgtgagatgacttatgaacatagttattcactgcaacactgtttgtaaataacaaaagatggtcgacaaactaaattccaacaataggaaaattgtgagttttctttcaacaatgtggagatcatttacactagtacatatggggatgcagggctagtttccttcatttatcttaagaactgactccttattgcatatgaatcagcatgtccagtctacgccccctcactcccatacattctacttttttttaaaatttaagctgtatattgcaccatttgtgaaaaagaggaagaaaaagcacatttgtacatatttacttgtagatgcatacagtatctttggaaggaatcacaagaaattgatagctgtggttgccccacaggagaagcccttgatgaatagggtgggtgaggcagggggtatcgatcttgaaattcatgaatgttgaaccctgtgaattgattacctattataatgaatccatttttaaataaaacaaaatcccagagtgggtagcctttagacctcaatgtacaaagttctaagcctcttaaattttgataacctataggcctaatagtctctcctcaggaaaagatctgaagattgtgtgttaaaaagtcacatttctttgggttagttcttattttggacttgaacacaactgctagaaaagtaaaagcctctcaacgcctcagccattctctctgcaatgcttttcctttccaatggtcctggcagtgggatgcaccatgacagcccatcttcgttccccacagtcgtgtgcatatatctgaacaaggccttccctcctaaaccacctgagattctgccatcccatttggtctaaagatccggtacacctatagtgagatgcctttttatttaccaatgaggaccaaatgcactaagtagtgaactaacatgaaaacaaaacaccaaggtaagttactgagctgggtgggaaaacatgagtgagacaattaattgcttgttgaaacactctaccctttcttagtagcactgagagacccattttgattagaaagcggaaatcagaaacattaaagagatttcaatgtgttaggtatccccatctccactattttatgtaactgtttccatcttgtctgaaaaaacaggataaacaatcctcagatagttctccacatggtaagtaatggccagtattatgtgaaatttactgaagttccaggaaagagaattttgcatggaatacactatctccaaactatcatttaaactgagatactccaatgcagttcatttcctggtacagaaacaaacaaacaaacaaacaaactaagacaatgccactcagcaaccccattcctagattttaaaacccaagtgaaatgaaagctatgttcacacaaaaatcatgcccaagtgcttctgggagctttattcatcatcacccaaacgtcttctacaggtgaatagatgaacaaactgtgatacatctatgcaagggtggacaactcggccatcaaaacgaatgaactattaacacacaacctggatgaatccgaacgaaatgcattacgctaatgataaagccagattcaaaggctacaaagcacataatcatatttatgccagttacgtgacattctggaaaaagcaaactatagggactgaaaacaggggctacaaaggagcacaggggaatttggggggtgtcagatctgttccatatcttgaattgtgggtggctacagtctcaaggaactttatactgaaaagagtcatctactgtttgtaattatacctgtttttaaaaaacacagaaattatcacgtataggaggaaatagttatattactttctggacaattgagtcatattctaaaattgattaatgtttaagtaaaatctacaaaagttagttcactagcaatgaaactgtaacaaaataacaagatatcaatttacatggcttacatacatgtgctgccaatatagagaaataataccatcatttgacaacttttttggcatgcttgctgtatcagacactgttttaggcacttggacatggcagggaacacaacaggtgaagcccatgctctgggggcttatgttttagtatcacattctggggcagaaccaacatggtaaaacatagctggttccttctacgtatggtatagtatacacacaggcgtcaatactaagtaaaatgggctgacaaaaagcatactgtccaatagtgtgatgtgaaacttcaaaatctgaaactttcttgagagcctggaaaagaaactgaagccactgaacaaaagtttaaaagaaagggaaaaatactattcataaaaagtaaacattaataaaagtaagtatatgcaggatctttagcagcagagtattaaattctaatcatggtgtgttgcgtggcttcaggagttagatagcacatattaacaaaattatgttaatagagactacctgatttcagatttcaataggatggagcatccctagtctgaaaatctgaaatctgaaacgttccaaagtccaaagctttctgggcactgacatgacattcaaagaagaccctcactggagcatttcggattctggatttttggattagggatgctcaaccattaaatatctacaaatactccaaatctgaaaaaattccaaaatccaaaacacctctagtcccaagcatttcggataaggactattcaagaaataacattccaacttgtaggtttacaaagttgacattcgtttggaactactggcataagtgcatgtaaagactccagactataaaccaaacatttaggagggctccaattacaaaggagcctggaattggcataattacaggccaaagtaatgaccgtggaacacagggagtccgccaaagaaaatgctctgtagagccagcccacacttatatatgaacaaccaaagagccagcagattgaaatcccagagtgaaatcatgtatgaatcacgatagtgcagcattcaaatccaagccaggatgcaggcaaacttcagagtagaggacaagagatgagtctagcagcaaatgaggctaacagcctaaagggcccttgttagaaagcaagagcacggttaggtggggtggctcgcactgtaatcccaacccactttgggaggctaggatgggaggatcacctgaaaccaggagtttaaggctgcagtgagctatgattgtgccactgtgctccagcctgcgtaacagtgcaagaccccatctctaaaacaagtaagtaaagaaagaaagagctcaggctgggtgcggtggctcacgcctgtaatcccagcactttgggaggctggggcaggggaatcacctaaggtcacaagttcaagaccagcctggccagcatgatgaaaccccatctctactaaaaatacaaaaaatagccaggcatggtggcgggcacctgtaatcccagctacttgggaggctgcggcaggagaattgcttgaaccaggaggcagaggctgcagtgagctgagacattgcattctgcctgggtgacaagagcaaaactctgtctagaaaaaaaaaataaataaaagaaaagaaaaaaagagctcagcaaaaagagcactgtagggtagatcacgtgttaattaagcagtacggaacagggtctctgcttcaggttaatccagggtaggctctggggacagatcacctaaggctgctctatgaaactactgtgagatgcagagaatgtcatgtggttaattctgggcactgttcatggggcagcagaggagaaggggcagaagacattcttttgtattagttgcattttcttagcaagtaaaaatatatattttcaatttacaaaatggttttttaaaatctgaaacacacggtcaaactatcatgactgtattttttttagattagaaaaagcttagtttttttcctgatgattactgaagaatgggatttctgcccatcggttcctaattttccattgacaggactgcttgctgctcctttcccaaaggtgaagatttgggttttagagaaattgtcttaaataattctttctgataaaacaaaggaagagctaattttgggctgaaatcatgcctggcatgtgacagtaaaaccataaacgtaaataagacactgtcatgggggaacggtagtgaggatgaagggaccgcgaccatcactggaaagcatgtgagccaatgctactggccaccagagacctgcccaacggatcagagcacacacagcaggtgtaaccctcacagctacccagaggtcaattctgtctgagcatcagtaatccagggtcaggacagcttgttcctatcagaagcaaaagggccacaatctcatgttgtccttcccagctcaagttcccaggacaagtaagtaggacaacagtgaaggtctccagagcccaccagcttttgctgagactgctagtccaagagccccagctgagtaaattctccaggaggaaaatggcagaaactatcaaaggatagtcagtaaactggtgggtctgtacctttttggcttaaatgctccagtaaataaaggcaaaatatttaaagcctcattctatgcactgcatttttttttttttttttttttagatagaggctggagtgcagtggtgcaatctcagctcactataacctccgcctcccaggttcaagtgattctcctgcctcagcctcctgagtagctgggattacaggtgcccgccaccacactaggctaatttttgtatttttagtagagacagggtttcttcatgttgttcaggatggtcttgaactcctgacctcaggtgatctgcctgcctcggcctcccaaagtgctgggattacaggcatgagccaccgtgcccggccctaggcactgtattatatctgaaagctaacagaacttgtaagttttgacacaggaccaaattaaatgggttggcatgaaaaaacttcaactttgttgcctcttgctagtcacaacatcctataactaatactttacaagagaaccactggccgtaggcctgtgaagacacctcagcagccactttgggatgtgaggaagagtcagggaagggagggaggaaatagatattctcacttaaagtagaacagctctgcttttatctgtttataaaataaagtattttaatatgtattattaaaattgacattagaattttatataagacttcatttaataaaagggtttcattgcttttttggaaaatctttatgctaaacgatgttcattttattgacttatttataaggaaacaaccatttgtaacttaccagatgaaaggtaaaatctattttctatcaccttggaaaggcactatttctctgagcctggatttgttttctgccaacaagtgacggcacaagctctctattacagagagtaaaaagcccaggcagtctttttcatggctgctcaccatgtaaacatgtccataaagtgttctgtgtagctaagttagaggacaagaagaagtactttacaaaaattacatctttacatatttgcgtttgtatgacatacttttttcttttattcctgataataaagttttaccattttataatttaaaaatgtaaatatggagttgggcatggtggttgggaggctgagaccagaagatcgcttgagcccaggggtttgagaccagcctgggcaacatgcagaaaccctgtctctacaaataaaaaattagccaagcgtggtagcacgcacctgtaatcccagctactcgggaggctgaggcaggagaatcgcttgagcctgggaggtggaggctgcagtgagctgagactgtaccactgcactccagcctgggtgacagagtgaggctctgtctcaaaaaaacaaaacacaaaaaaacaaacaaaaaaaagcaaatatatgtaaaaataggaagtgcggtttcccaaaatgaggtctgtaaacaactgatctagaaaatgttctggaaaaagtaaaaaaggatcaggatctgaggtcaactgacctctccctgcgctctggacaggcaaacaggcaaggttccctctgaggccgtagcggcttctcgtgggcgagtccctgttcgcaggtgacgtgtggaccacgctcttccgaagcgtctggcctgtgtgctctcggggaggggacgcaggtcagcccacctagccgatggctaacaagtcagtttgttttctgaacggaagcttaaacctagaaaagtaactgggttggggtgggggtgtagccacatgcagtaaaagcactgcctgtctgtataacaacgacctgatgaaaaaaggaacgcgtgaaatggggagtgttagggcgtcacaaactccagtgtggttgaaatgaaagcagaaagcaaatggcaagctggcttccccttccagcttttcacaaccctgccttgctcatggtcagccccaagcacgggcggaagaaaggactggaggggagggaaaggggtggggagcgagggtaccagaggcgtgggaggacggggacaaaggggcagcaagggaccggcggaaaggaaagtcggcgttagctggattggaaacagtccagacagaacgatgggctctgctgcctccgggtggggcaccaagcggggagcggggccacgaggcaggggacagtgaagcaccatgcagcgcccaccagccggcagcgcccaccagcctgcgctgcgctgcacatggtacccgcggccccagctggccagtgtgtggcggagatgagaccctcgtgaagagactaagcggccacagcagggggaagggttgctcacataaccccatactgctcacactacgaggttaactgccgtgagatctgcctgcagccagcagaaacccgttctaggaaaacgttgcccagtgacttcagtgagtgccactgacccgggcgcctccgccccggcgtccggcagcagcaccgattgcgcaggaggcaccttgcaaacaacctttcctgatccgcgctgcagttcccaggccggttgcagccgtttcacagagactgcgcacacaaagcgtctccgtgccctgccattcacctttcgacacagccgcaacccctcttttcagtgttaaaacctggcgccaaaaggaacatgcgatgtgacgtgttacctctgcgcatgcgccgggcattcccagcgccccgaacctgatgaacgcgcggtggggaccccaggcttccgtgctttcgttttcctggaagctacgtgtcctcagtctacatattgttacctggaaaataaagttttctccttttttcttcctttgttaacaggcagaaggtgtaggctgcaggtttcgggcctaagagagggcatggctggcgacacggagtagactcctagatgacataacggaggcgagtctgcaccggggactcggcattaggaggaggcagaggaaaagcccaccaccgtggccgagggagatctagcaagcagcttgcagggggtgaagtgtgtgcaaagcaggctgagacctgtccagtatcgaaacacgccgcggtggtcaagcaggctttaccatgctcaggcgcaggctggtacaagatttgcagcaacaaacaccaagtggagaactacatgaacacttttgatcgcatcccagttttcagacaatctcggataattctgaaaatgcttcttatgcattatataagagtttaggttatgatttaacagacaagctttttcaggagtattaggttattggcagaagaagagacctacttaaagtttggatgactgtattcctaaaaggttcatacctctcaaaattaccttaagatctcttctggctcagagatttaaatttttataccctaagtccttacaacaagcattcactgttacaactgatcattcatttactaagaatccagcaggttaaagtagaatatttaagcttaaaaaaaaaaacaaaaaaactagcattttagctttgcaatttttcttcataataatgaactgttatgtatagggtttctcctttttttttcataagaaattacgggcatgcccaattaaggtagtattgaggttcttaaggtaacagtactcagtccacagtgtataaatttcttctcactgtaacctggctatgctggggagtaaatctcttatttatgtttttcacaaccataatatttaacaatgtcattttcatgagtacatgtgccagaatttaagaatgtaaaacattctggatttataaaaacaaatgaattatatttacactacagaaagatttactgcaggatttttctaaccaataagctcccctacagcgttccaagacacaaagtaatttacagtgcatttgagtccaactttttgatcaagaacacatctgctgcactaagcaaaggagttgcagcaacaccaaaatcacacttggctctcacggccaaaatcgccgtcacctccgtatgttctccttggtcactgactctccttcctccaagcagacatagacagtgggcacatatttgacaatctgtgaagcatctgacaagcactcattatgccatttggagggtgtactaacgtaactagcattgtggcatacaaagggcaattctaagggtgaacagacttcggagcgtggaaaagaacatgacaatgccaccacctattactgcggcccccacgaggtgttggaagctaggataagtgtcttaaaacactatctcatttaatttttaaaatacaacctttgagtaggtatcatctccattctacagatgagaattaagacccagagaaggcacaaagaatcctggatttaggaataaaaagatgcaacttcaaatatttgctatcatcagtccccctggcatgtccctgaattctctgggcctcagtcttctgaaccacaaaacggagaaaacgctacctcttaacagtatatggaggattaaagcactctgtgagctggaaaaggctatcctagtctacctagttataaaacagtattagttaggtgtttccatgggaaatttaatctttcactggaagtagggaattagggaatgtttaacacaattcctgattatctcatatcacccatgggtctttggaaacagaagtcaagtttttaggccaggtgtggtggctcatgcctgtaatcccaacacttttgtcaggccaaggcaggaggattgcttgaggccaggagtttgagaccgacctgggcaacatagcgtgatttcatctctatcttaataaaatacttaaaaaaagaagttttctacccaagtggaaggatgcttagggagaaggtgccccaacagcaatgctgcaagcttggagaaagggtctatattcacgctgagccacaggaactgggatgaagaccctggaaaatcaaaccttggacaattttctattatattccattcctgaatcagagagaaaaccatatttataggaattctggaatctctactcccaatttatttgaatcatgatcttaagaatgactattttaaagcaaatacaagtaatggtgggtgcaatgtgtagctctggggctatgtcaaaataagaataaatcttatcaacatctgtctgaaattgatacctagaatattatttataattacgaagcaaaatccataatgtgcctacaataccatagtttcccctttctgatcaatgcatttataaaattatcagtcttctgcattttgtttaaatgtttcagggcttcaactcatcatttaataaagtttttgagcacctattaagtggtgagtactgccaggcccaggaatacaaagataaacaaaaccaaatattttaattgagtggactaatagaacaaagtcactacaacagaaggtaatcagtgcaatgacagcagtatacacaaaatgtgtttgtaaactattgccagttactactaaattacagaaaacattcccatgttattctgttcactttgtttccttcgctgtgtagaagttttttagcttgatgtgatcccatctgtccatttttgcttgggttgcctgtccttttaaggtattgctcaagaaatctttgcccagaccaatgtcctggagcattccccaatgtttcttttagtagcttcatagtttcggatcttctaagtccttagtccattttgattgtcattcccatgttattttgtcttttcctgacaattagacttgacattccgttatcccatcacaatctcactttcttgttagttactctttttgtaattctgcttgtaagaaagtttctaaaatttaaatattaaaattaggaatttttgtaaggctatgggtgacaagagttgttgctataacagaaactgaagcacacatttctatacaactcatgtcaaaaaaaaaaatggaaattagaagatattttaagttgtacaatgatagaaaatactaccaatcaaatcttgtggacacaattttcagacttggcagtgaagcattatctcggggtcctctgacattcccacagtgcatgaggttaccaaaccatgaaacctcatcaaggtcctttggagcagggtcttctcccagaatctagatggagtgatcctacttccagtctcctctccagcaggatgtgggtagggttacaagggtttgccttacaataattcactcacctattaaaaagaaaaataaaacttaaggtacgaagtactacttagagtagtacttagtgggaaatgtctacatttttaaaaaggaggctacaattcaatatgctgaacagccaacttacaaagtttaaaaaaaaagaacataataaaccctaagaaaacagaaatattttggaaagacagtcaacctaagtcacattaaaaaactgctgttgctgccagattagatgaggatgagcaactataaacacctggtcaaccaagtaaaagaaacagtctaaaggactcaggttgcgtcccaaatgtctgcaaactcttcttcaccaggtttacattgtctattcctcatgactgaaaccagcagtgcatggtgggcacttagtttaacactcagttttcaaaactaggtttgatgaagctccagaagggcccccagcttctcccttttccccccagatgactataccctactttatgctccttcatacatcacagatgctcttatttgagcacttgatcatctttttaatcatcttttattttatatatttgcctatctctactaacctgtaaccctcatgagatcaacatacattggctgaatgaagctgattgattaaataatataaaaaagaatgggactgatgaaaatgttaatatgaaaaggtatccaagataaaggtacattattaagagaacaagttgcgtgtgtgtgcacacgtgtgtctggaacactacacaaatcatcagtggatacgtccaagggcagaacagggagtcaggaagagtaaggagacttcacttttcattttaccttcttctgtagcacgttaatttttttttttttttttgagacagagtcttgctctgttgcccaggctggagtgcagtggtgtgatcttggcttactgcaacctctgcctcccgggttcaagtggttctcaaacctcagcctcccaagtagctgggattacaggcgtgcaccacacccagctaatttttgtatttttagtagagatgaggtttcgccacgttggccaggctggtctcaaactcctgggctcaagtgatctgcctacctcggcctcccaaagtgctgggattacaggtgtgagtcaccgcacccagctgggatattacattttaacgtttatattttttaaatgcttcaactgtaatttttaaaaaatcattttgtcagtgagtattttttcttaaaaaaaaggtcaattttaaatctaagtataacttaggtttctctggtgtccacagaatcaagccattttcaaatgcttccacaactaagatactgaaaagcacaataacagaatcagcatatattcaaagtagaagtcatatcagtctctttttattgaaatatcacaatgttattcacagcactcctacgaaatgaataacaacatttctatattacaaattcctccattttgcataaatggccactcctagggaggcagaataatagagtgttcaatggacatgctttgaactggaactgatctgagttggaatccagactctgtccaattagtcgggtgaagttcttcaacttgtctagttgggttatgaaattcatcaacttgtctaagccaccatttcctcattagaaaaatgagagtgatactgcctggctgtcaaaccctaccccagaacctctgctggaacataagcttgccttatgtgcttacgctgacaaacacgtttcacttgaaagacaatcacttaatgacctcaagcctgggatagtactgcttaggatcaggctaaagtaggtggcagtcacctcaagcaacccataagaattgtaggcatggtgctctggcaggtccataggtaagtcaaatctttggtaactgaatctttactgtcactgttgagatgtacggagaaaagagaaaatgtgtatgctatcagctccattgcagccagctaagggtgaggaggataggagagaagggccgcttctcccacaaccacagcgcaaactagatgtgacatatgcactgtctgcagtcaatgaggcctcctcaaggaccagacagcaaggatcctgctacgtgaggcttggaaaacagccatgacagtgctggctgcctactccacctaccctgaattacagatcatggagtctagcacatgagtcatgggcacacatgtcagagatttttgtcaattgattaattagtttaataactttctcttttctgtcgccttttaaaaaaacatagcaaccatctatttggaagttatactggtttttcttttatattcaccatataaggtttcctttaaaatgcatgtaagtataaaaagtgactgaaggttgagagaagctgccttcagccatcaattgcagatgctgttccttatactagcaccaggagatgtagtctaagggacagagctgactctgtcttcaactctgtgacccgcaggaagtggtcctggctgtgtatgacttctgctggggcaactttaccattccactgcttgtgtcttttctaatgtacttttcattacttgtatcatatttaaaaccacagaaaatatctcagcatcccagctggagtaacatttctgaagagaacatgctaacttgttaatgaaataatgaatactaaagttaaatgcatatatagtctcctgtcactgccctcccattgttattttgaaacatttccaagctccagaaaagttacgagaatacaaagtagtggaaaaattggaaccgtcatacagtgctggtagactgtaaagtggtgcagacatttttggaaaataatttggcaactcttcaaaaagttaaagtagctcagcaaaatccactcctaggtatatatccaagagaaatgaaaacatcctctcacataaaaacttgtactagaatgttcataacattattaatagcgaaaaggtagaaataactccaatgtccatcaagagaccagtggttaaacaaaatatgatctatccatacaatggaatattattcagccacagaaaggaatgaggaactgactcatgctatgacaagcatgaacactgaacattactcgaagtaaaagaagcctgtcagtcaaaagggccacatagtgtacgattccatttatatgaaatgtcaagaataggcaactccagagacaaagtcaatttgtgactgccaggggtcaggagggagggggaatgaggagtgacagctaatgggttcagggtttctttttggggtgaaaatgttctagaattagatcgtggtgatgggtgtgcaactctgcaaatacactaaaaaactactgaattgtatactttcaaagggtaaatttcgtattttaaattatctttataaagctgtttttaaaaagaatacaaagtagacccatgtagcttttaacttcattcagcaattgttagtattttgccacattcactttctttctcctatacacatatgtgcataaacatatgtgcacagtctacggcttgacactttgatcctaaatacttcagcatgtggagtattctacataaccaaaatataaatattacactggagaaattcaacaccaatatacaacaattatagtccatagtcgaatttatattttatcagaaattaagcattctatttggttctcatgtccctttagtcttatagtctagaaaaattatctcgcctttattttttgacactgatatttccgaagaatccacgctacttgtttcacagaatgcccttcaatttggatattccttattgtttccttatgaactgatacggattaaacatttttggcaggaatactacataggtgagttgtggccttctctgtgcatcatgccaaggggtaccgaatgtcagtcgtctcattagttgtgatggtgaagtggtgttcattgttgtgcttggctagaggagtgtgactaccagatttctccattataaaggtagctttttctctttttttttttttttttttttttttgagacggggtctcactctgttgcccaggctggagtgcagtggcacaatctcgtctcactgcagcctccgcctcccgggttccagcgatttttctgcctcagcctccctggtagcttggattagaggcgtccgccaccacgcccggttaatttttgtatttttagtagagaccaggtttcaccatgttggccaggctggtctcgaactcctgacctcaggtgatccgcccgcctcggcctcccaaagtgctggtaatacaagcgtgagccaccgcgcgggccagatttttccctttgtaattaaccatcaaggggatgaccatttgagcttgtgtaaataagagcaggcttccctagttgtcttttgcccaaaagttttagcatccatccaagacctttgtctgaaattctgtcccttttgagattactttgcattaatatgaccaaccactgcgatcaattttattccaaagagtgttggggctgtgatttcaaccctagctgcacatatatcaccggtatcgctgggagtggaacccaagcaatcatattttaaaattctccaggatgactgattctgatgtagagtaagggttgagattccccgagttagaggaaccttacaacaccctcatttgcaaataaggacactgaggcccaaggaggttaaatgactggccaatgtcacaaaacctgttaatggcatagtcaagattttacttttttatacttgcattttaatagccattcctttgtgtcagtcgaagaataaaaccagaaaaagcagtaactttcgtagtatgttagtatgttgttaaaagtgactaccatctaatatatgctgccgccagacatacccatttctgcttccaaggtttgttttagctttcgttcattagacctttgcggtcaccttaggagagagggaaaggggagtttggtcgtcaactcctccgccctcagcgctcactgagggagctcaagcctgagaacccaacaccgccgggtgttcaaggggccagatgggaagagcgcagccccggagctgggcgcctgccctgcacgtcccgcagatgcggcggcggcgcctgccctggggcctcctcgcagggcagccagcctcgcgcgggaagcacctggcggggacgcacctggcgggaacgcacccaccttggcggagacgcacctggcgggacagccctgccccgcctagggacgcgggacgtgcgcagagcgatggagacagcggaacctgcagacccgcccaaccccacctccatccccacccccagcccccacttaccccggcgtgataaactttattcgctcttttaatcttgatgtccagggcggtccccatctccaattctccgcagcagccgccacttccggctgcgcgtgaccccagggaaacaaggggcgcctccccgcttcgttctgggccccgcccctttccctctctgccggcagtggctcacgtgacctcgcagcggcgtcgcacacactccctagctccgaggggcgaatgcccacgccttcctccttccggcacaagagccggccttagtgcgggccgaagcgctgtcacggttcaccccgccccctctgggcgtgaaagacggggccaagctagccccaccccttccgtagggacagtcttacgccggaaatgctcctttgctgtccgggttagcggagggagggaggaacggctctccccgcgtgccccgcggctggaggcggagccgagcctgtctgtcggttgcagcctgcgcaggaaggatgacgctcccgtcaggctgtgcggcgcagacggtcgcccaatggagttgtctttcaggaggttttaacttggtaatgcctgccctcctcaaatgtccttagtctcctcaactctagccctccaccgctttctccctggggttctgaagagccggcgcccccttgtctgtctgcggccaggcgccgcaccctgcccttcccgcgggagcggttccggtcaccctcaggggtgcggcccctgcgtgctagtcctgcaaagcgctgattggccggcggctcggttgcctcgcgtcccagcgccagctgggcctagggccaaggtctcgggaagcgccgggtgacctcgctcctctcggagccgcgggcgctgggtcacccgccagccgggctccgcgggccgcgagggattgtgggtgttccccaggcgcgtgtcctggaaccgggtgttaaatattcagatccgtgcgccccgcgtgaagggtggaaaggcacggcccccaggctctggggcttggagattggttgcaaatgaaagactgaaagctggagtgaatctgcctattatttttattcccagcaacagctgaccccagatacagtttgtgggggtggggggcgttactgcagggcagggcagtgcactgttaacgtacttcgtttattgagttaaaatctcttgtaaatgttataaatgaggattttgccaataagcagaaggtcaaatttcattttgacaaatgatttaattaaataatgcggtgaaaagtgctttttgtttaaattctttgctttttgtttaaattctttgattctgatcattattttttaaagtgcattgcttttgggataacatcagaaactatctgtaaaaagaattagtatcacgaatgcctccctcttaagaatataaaatgttttacaggccagcagtgatggtgctgcagctacaattgcatttgaaggttaataaatggtattttcaaatattcaggtcttggtttgcagctcctctctgccctcagggctttggtctctgtcttcaatgttttcctggcaattcaaaactcagcgattttagaacaattcattagggacttgaaaatcacagtctagtctatttgaattcaagaagtggatccctttccgctagactcacccatcattttcaagtggtaaaaaatcaatctcagtagacactgcagagaaacaggaaaagaaacacatgtatcaacattgtatacttggtttttttgttttgttttgttgttgagacggagtctcgctctgtcgcccaggctggagtgcagtggtgctatcttggttcactgcaacctccgcctcccaggttcaagcgattctcctgcctcagcctcccgagcagttgggactacaggcatgcgccaccattcccagctaatttttgtattagtagagatggggtttcaccatgttggccatgctggtctcgaactcctgacctcatgatccacccgtctcggcttcccaaagtgctgggactacaggggtgagccactgcgcccagcctccaatcgctatccttttaaatcttttccatccctcactcacaccttagatgataccttaactttctggtccatttgagttaccaaaaatcagaccgtgttaaagtgtcgatctcatgtctcaagtgggaccctaaatcccttagtgtgagtgggaaggtgcaaagcgtggttctggcatgcagacacttctcaacgtacctctgcaaggcctggcttctgtgttgagataaggaagaggagagaaaatgagacaaatatctcttaactagccactgctgaattttcttagttgattcctgcctctctggtaactgtctcgtttaaaattcctttcgtggggtacagatggggaggtcgggtggggccttctccctgccgcacagttccatgggagatcttttccatcacccgcccccgccgccgtcagcaccgggcagtacactcagcctctcaggcaagatcactcaggaccatttatcttccgcataggaagaatttgacccaggagaaatacacatctttgccacacaaaagggctggactgaagaccaccccgtggctactcctctctcccctgctatatccctcttcaattttgttgttcccccttgccatacagacagggataagtcagcaagagtgctggaggaacagatctgcaggcaacagatagaataccagactccccttccagcaggccctctgataccttggagagattgtcctatgtccttcccagctacatcacttcccaccagaaacaccgtcctccgcaataccgactgcctcctttcattccttcccctgccttcctgtatagattgaggagaggactggggaagtatttggtggaagcggggccagatctgcagctttttattaagccctgggggaagtggccccaattataggcatctttcattaggagatggagtactatgcctgtagttttccattgtgagcctagtgccaattctgggacaatagtagaggtcccactaaacatctttaagtgggtgctatgattctctgcgcagactcttcctgcaggactggaggacatgttccctgagctgctaggagtattggtctcaacagttttcagctaagtcactcttcaaagcttggctttaatgaagaaaactgccttgcccaaggtcattcccccttctagggggcagcccacacttgacaattaatccatttaggatatagaggcctctccgttgttccagtttaggacaactctgaaggaccattccatattcaaaactcccagtattagttaaatactgatgtgtagcaaattactccaatctgtagtagctttaaataacaaacgtctcattatgtctgcgagttgggaactcaggagcagcttccctgggtgttcctggctcaaggtgtcagattcttgcagttgtctgaaggcctgttgtcggctggaagatccagttccaagatggctccctcacatggctgaggttgggagcactcacttccactccacaggctgcttgagaagcctcacagtatggcagctagcttctcccagaccagtcaatcaagagagagtgcaattagggagctgcaatgccctgtgaggccaagtatctgaaggacatctacttttcttctcttcatcagaagacagtcactaaatcccactaattccatttgggaaggggaatttagctctacctatggaagggagggtcaaagaatttgaggacatattttaaaccactacgctccgcattgaatcctgcttcctacacccaaaccctgtgcgcctgttgatcctgagagcatctccccaataaacttcctgcatgttaaatctccatctcgtattctgccttctggcaacctaacctcaacaatccagttatgctagtttcataataaccctcataataaccctcaagacactcttgtgatacaggaaaaattactatttcctcaccttacaaaagggaagacaggcacagaaagattaatgtacttgcccaaggtcatagagcaactaagtggcagccaccaattctgactccagagttcatataggcaattgctgatcaatgcgctacatacatgcacacaacaaacgcctgggtgcataacaatggggggctcatgatcttaatcaaaagactggacaaaagactgccaatcaaatgggaaaatccagcagaggtgcaatgtcatagtcaaaggcaatcttaaagagaggaatggggggtcattgtatcaactgatggtgaagatagaatattaaaactattgcagaatagtataatgctttagtttgctacggctgccacaacgaagtaccacaaactgggtggcttcaaacaacagaaatttattctttcactcttctggaggctgcaagttcaaaatcaagatgtcagcagggttgttcttctgaggacggtgaggaaagaatctgttccagttctctctccttggcttttaggtggccctcttatgtctcctcactctatctttaaaaaatgtgtcttcatggctgggcacagtggctcacacctgtaatcccagcactttgggaggtcaaggcaggaggatcccttgagcccaggagttcgagactagcctgggcaacatggcgaaaccccccatctctacaaaaatataaaaattagctggatgtggtgacgcatgcctgtagtcccagctacttgggaagctgaggtgggaggatcgcttgagcctgggaggcagaggttgcagtgagccaagatcatgtcactgcactctggcctgggcgacagagcgagaccctgtctcaaaaaataaaataaaatgtatcttcatgttcacgtgatgttctttctgtatcaatgtctgactccaaacttgccctttttctaaatacaccagtcatcttgtattaaggtccactaatgacccccttttaacttgattacctttgtaaagaccctacttccaaataccgtcacattctgaagtaccaagggctaggaccttaatttggcagggaaacaattcaacccagaacaccatcctcatagatgggattagtgccctataaaaggaatggaagggagctagctagtccttttgcccttctgtcccttctgccaagagaggacatggcatttgtcccttctggaggactcagcattcaaggcgccatcttggaagcagagtggaaccagacacaacgtgctggtaccttgttcttaaacttcccagtcttcggaactatgagaaatgaacttctattgtttagaaattacccactctgtggtattttgttataacagcatgaatggactgagacaattgcatgtatggccactaagaacatctcaatgttgattatgtacaagtttgattaaggatgtcctggataccttaactaccacaacttacaccacttggcagttaagacacactttctcaaataacaaaatgtgaagcattctttgtaaacaaacacataaaaatacaatatttgttttttataaacaatatatatgaaatttatatataaataaagaaaaataaaattttaaaataaaatttaaattaaagataaattagccaggtgtggtggctcacacctgtaatcccagcactttgggaggccaaggagtgtggatcatctgaggtcaggagttcgacattagcctagccaaaatggtgaaacctcatcggtactaaaaatacaaaaattagccaggcgtggtggcgcaggcctgtaatcccaggtccccgggaagctgaggctagaggatcacttgaacctgggaggcagaggttgtagtgagctgagatcacgtcactgtactccagcctgggtgacagagtgagatttcatctaaaaaaaaaattaattaaaataaaataaaataaataaaattagaaaataaaatagaattttaaaatgtaaacatacataaaaatttatataaaaatgtttaatgaattttataaaaataaaatttatatataaattttatattttatataaattttttattaaaatgtgattaaaatacaatatttgtttcttatttgtcaagaaacaagtaaaaatatgataccagactaaaaataacaaagtatgaatgcttcacaccaaaacctatgggatacaggtaaaaaaagaatcctctgaaaaattattggaaaaagtttggaaatttggtcagagtgaaatgatatgctatctgggatttgcttctaaataactctaggaggaggaagagggagaaggaggaggagggggaggggagaaagaggaggatgaggaggggtggagaaggaggaggggggaggggagaaagtaggatggggaggggcggagaaggaggggaggaaatggaggaagagggaaggggtacaggaggaggaggaggaaaggttttattcactcattcactctgcctttgtatacacttgagttccataacaaaagaagagaagataaatttacaaagtaggataatatttttgaaatattaagctgaagtatttttaaaattccttgtcattcccagcaggtgcccctcaactctctctccatcaagtttataccctgaagcaaaaaatgtgtgttgaagagcactttgccaaagatctgaaacatggtttggtctagaggaaggggaatagaatgagaagagcagaagtagctcctggggtgggatccagctgtatttcatgcttggagtcaacgtcccagttggggttagaaatgcgcagggcaatagaaaacatgacaggaaactcggagctcgagagagaagaatcaaatgattaaaataacccaaaagttagaggtatgggctgagtcagccaagggggagtcccggctctttctagcggtccctctagtgtgctattgcctgtgcagagatgggattttgagacactccagctgggacgttggcagataggcaagggacatggcatttttgaaccatatgcctctctccatcccaagtagaatgcttttggggaaaggtaagaaggagactgaggatgtgaaaagagaattctaaaacactggctatcagctgggttccaactgaataatgagactgattttcttctcccctgtcctcagcagaaatggttactggggagctaaactgggttaatttatagagaaatgaagactggtacttttttggtcatctatatgtatgcctgtaaattttgaaacagcctacgtatgcaaaaatcaataggcattacgatttaacagcaacaaccagttagaaaataaaatgaagatacagactgtattctcaatagcaatcaaaatataaaatatttggagtaatttgaatgtgatctatgttttagttacatgagaaaagctataaggctgaattaagaaatgtgaaatatggcaaaatagagatttacagtatttctgaatagaaaatctattttaaaatgtccagttgtatacaattaatttttagagctaattactctcaatatcctaataaaatttttcatgaggaaattcaatgaaattctgttaaaattcttctgaaaaaataaagaagtattttgaaatgacatctctttaaagagctaattgtaggagaaaggtttttactaggcataaaatatagtataactgtaagaattaaaagagcatcatcctgacataagagcaattggataggacagatcattcagaacagatcccaacatattatgtataggattatttatttatttatttatttatttatttatttatttatttatttttgagacggagtctcactctgtcacccaggctggagtgcagtggcacgatctcggctcactgcaacctcggcctcccgggttcaagggattctcctgcctcagcctcccgagtagctgggactacaggcgcagccaccacgcccggctaattttttgtatttttagtacagacggggtttcaccgtgttagccaggatagtctctatcttctgaccttgtgatgatctgcccgcctcatcctcccaaagtgctgggattacaggtgtgagccaccacgcccggcctatttattttttattgtatatattcaagttgtatatgaaatttcaataaatgataaaagaggcattgcaaatctataaagaacaggggattactcagtaaatgatattacactaaatgctatttagaagaaaaattcatttagattttaccataacagcatatatcaaaaaaaaggaagagagagaagaaaagacctagttggattaaagagttcaggaaataataaaacaagttaaggcacagacttaatgaaaagtatggaaaacttatatgagaaaaactactaaagtcttgcatgagacgtcacagtagatttgaacagaaggcaaacataccattatcttggataggaaagtgtaacatcataaaaatgttaagtctcctctgcttaatttatatatttaaattaacactaacaaaaatattaatttatttatggagccaggcaggttgattataaaatttatttggaataataaataagggagaatagccagaacaaatctcaaaagagatgaaccggtggggggcagggggaggaggaggagcctaggacgtgtcatacagagagtggcacctgggactcattttagccagtggaaggcagtgagagttctgcacctaaatcttttttttttttaaacagagttttgctcttgtcgcccaggctggagtgcaatggcgtgatctcagctcaccgcaacctccacctcccgggttcaagcaattctcttgcctcagcctcccgagtggctaggattataggcatgcaccccatgctctgctgcttttgtatttttagtagagatggggtttctccatgttggtcgggctggtctcgaactcccaatctgaggttatccccctgcctcagcctcccaaagtgctgggattacaggcatgagccaccgcacccagcctctgcacctaaatcttaaaaaggcctggcaacaggcctggcacagtggctcatgcctgtagtcccaaaactatgagccaaggtgggaggatcgcttgaggtcaggattttgagaccagcatgggcaacccagtgagacctatctctacaacaacaacaacaaaatttttttaattagctggtcacagtggcatgcgcctgtaatcccagctactcaggaggctgaggtgggaggattgcttgagcccaggagtttgaggctgcagtgacctatgattacaccactacattccagcctggatgacagagcaagaccctatttcgaaaaaaaaaaaggcctgacctggcaacttctgcttttacatgctgggagggctgagtatgatgtaaggagcccagtgaccctgatggagacactgttgaaggaccacaaagaggagaggccctgaacaatatggagaaagaaggggtgggagagagagagaaaaccccagctcccccagcgtagccaccaagaatggccctcctgccatgtccacaaggacccaacatacacatgaagccatctcgggatttccactccactgccataaaactgcagtcacgtgaacgacacaaagtgagactggcaaaaggaccactcagctgagccacagtccaccagtagaattgtgaaaaataatacagtggccattgtcctaagccactgagttttgaggtggtttgtgatgcggcagtaggtgaccagatcaaatgattaccgaaggggaaaagacagaatagggcagggagacaggaagagaagcaagacatctctgcatgttatgtcatagaattttgactctgtatccatgtaaatgttttagctaatttaaaaaaattttaatttaaaaaattaaaccacacagaaaagagaaatacaatggaattgttaaaacttcagtggggtagaggtaggaagactttctacatgactgatagaaacatcacaaaggaggccaggtgcagtggctcacgcctgtaattccagcactttggaaggccgaggcgggcggatcacaaggtcaggagtttgagaccagcctggccaagatggtgaaaccccatctctactgaaaaatacaaaaatcagctgggcgtggcggcatgtgcctgtaatcccagctacttgggaggttgaggtaggagaattgcttgaacccgggaggcggaggttgcagtgagccgagatcgtgccagtgcactccagcccgggtgacagtgcgagactgcgtctcaaaacaaaaacaaaaacaaaaaacaaacaaacaaaaaagaaacatcacaaaggaaaaacatagccacagctggatgcagtggctcatgcctgtaatcccagcactttgggatgctgaggtgggaggatcacttgagcccaggagttgggcaacatagtgagacccctatgtaaaaaatacaaaaattagccaggcatggcggcgtgtgcctgtagtctcagctatgcagaaagctgaggccagaggatcacttgagtcggggaggtcgaggctgcagtgaaccgtgatcgcatcactgcattccagcctgggccacaaagcaagatcatgtctcaaaaaaaaaaaaaagaaaaagaaaaaaagtcaatttattatatagaaaattttcctatacatcagtggggaaacccataataagaaggaaagaactgctgggcgcagtggctcatgcctataatcccagcactttgggaggccaaggcaggtgggtcacctgaggttgggagtttgagaccagcctgaccaacatggagaaaccctgtctctaccaaaaatacaaaattagccggatgtggtggcacatgcctgtaaccccagctactcgggaggctgagaggggagaatcacttgaacccgggaggtggaggctgcggtgagtcgagatcgcgccattgcattccagcctgggcaacaagagtgaaacgctggcccccccccgcccccccagaaaaaaggaaagaacattttgggaaatatatacaacaaacatgacaagaaaagttcacattttgaccacagaggatgtgttagttttctacagccgtgtaataaataactataaatgtagagatgcgaaacaacacccactgattagctcacagctctgtgggttcaactggattctctgcttagggtcaaacagggttgagatcaaggtgtctgcctggctgggctattacctggaggctctgggaagcacctacttgaaagctcattgaggtgacgggcagaattcagttccttgtggttgtaggactccagtcacgtgccctcgctgactgtcagcagggaccactctcagcttttaaagacgtctctctgatcagtgggcagagcccctccatcatcaaagccagccatggtgcatcaaatccttcttgtgctttgaatctctttgactgccctttctgcggccagacagagaacattttctgcttttaaaaggctaatgatattagattaggcccacctagaaaatctccctatttgaagattaaccatgccaggtaacataatcttgggagtgatatttcatcatatccacagcttccaccctcactcaaagggaggggattatagaaagaagaaggtcattgggggtcattcttagaattttgactaccagaggggataacattcacatctataataagaactctaagacacaggacatgaataacagtttgcaaaagaggaaatcaagtagttagcagacatatgggaaaatgtttcacttcaattgaaataaaagaaattctagtagaaatcttctactcacagattaaattagcaaaaaatactaaatattggcagctatgtggtgaaacaggcatttcattcattgatgatagcaatgtgaatggtacaacacatgtagaaataaatttggaaatatataccaacgcctttaaaatgtttatattctttggcccagtaatttgactgctgggaatctatgtaaagattaatcctaaatttggaaaaaaaatttcccagcaatcaagtaatcctaaatttgagaaaaaaacatttttaaacactgatatggtttggctctgtgtccccacccaaatctcactttgacttgtaataatccccacgtgtcatgggagggacccggtgggaggtaactgaatcatgagggcaggtttttcctgtgctgttctcatgatagtgaataagtctcacaagatctgatggctttataaagcagagttcccctacacagatctcttgcctgccgccatgtaagacatgactttgttcttcatttgtcttctgccatgattatgaggcctcccaagccatgcagaaccgtgagtccactaaacctctttcttttataaattacccagtctcaggtatgtctttattatcagcatgaggacagactaataaaaacaccatggtattcacggcaaattattaataatgaaaaagtggaaacaatctaattggcaaaatggacattgttggatacattacaccttcaaatcaacaagatattaggcagtcactgaaaacatggttatgctgaaagaaaatacaagaaggtctgataaatggagaagaaacattccatgtttatggagtacaagactcaagatgccatctctccctcaatgcaattgcattctataatcccagtttttggtttaaaaatttaaacacttgtatgataatgcaaagatcctataacagccaacacattttgaaaaagtagagcacagcaggaggatttacactgcctgactttaagacctggcataaaacaacaaggatcgatgcttaaagagagataagcagatcaatggaacagattagggagtccagaaataaaaccgtatacatatggtcaacaaaaatcatatatgactttcaacaaaggtgccaaggcaattccacagggacaggaaagccttttcaacaactggtgctggaacaactggatatccatacgggaaaaaaatgaaccttgcctgttacttgacaccatatacaaacattaacttgaaatggatcatagacctaaaagctaatactataaagtttcttttttttttctaatcttatattttttattttttttgagatgaagtctcactctgtcatccatgctggtgtgcaatagagccatctcggctcactgcaacctccgcctcccaggttcatgcaattctcctgcctcagcctcccaagtagctggaactacaggtgcctgccaccacacccagctaatttttgtatttttagtagagatgggatttcaccatcttggccaggctggttttgaactcccatagtgctgggattacaggcatgagccaccacgcctggcccttatgtttggtttttgctcttctcacagatatgcattatttcaaaactatttgccagtaaatgaaagtatttactattcaagttaaaaatatttcctattgaatttaaaaaaagtgaaaggaaattgacaagagcagcattagcattatttcaactgcaagagccagaaaccaatttattttttattttattttgttattactattatttttgagacagggtctttctctgtcacccaggctggagtgcattggcacaaacaaggctcaatgcagcctcagcctcctgggctcaagtgatcctcctgcttcagtctcccaagcagctgggactataggagtacactatcatggttgtctgattttttgattatttgtagacacagggctctgctatgttgcccaggctattttttttttttgagatggagtcttgctctgttgcccaggctgtagtgcagtggcacaatctcagctcactgcaaactccacctcccgggttcacgccattctcctgcctcagcctcctgagtagctgggactacaggcgcctgctaccatgcccggctgattttttgtatttttagtagagatggggtttcaccgtgttagccaggatggtgttgatctcctgacctcatgatccgcctgcctcagcctcccaaagtgctgggattaccggcgtgagcacagcgcccagcctgcccaggctagtctttaacttctgggctcaacaattttcccaccttagcctcccaaagtgctgggattacaagcatgagccaccatgcccagtccagaaatcaaagtaaataaccttaaaccaaacacagatgaattggctttcctaactcaacccaggatggagttgttttcagttgagttacatatacaaagtcaatttaccagtttcctaatagtcttcttaccatttataggggagacatctaagttatgtcaataggcaaatcaacgaatactacatcacaaacagtttcaatatttaagaggcaataagagaaggaaagcttgtggaaaccacacattttatttattaccttcatttcattctcacagcctagcaataattcagagctaacgtgtggcaacacatctccactttcctggtttgtgcgtttgcttcctccttgcctgtcccagtgcggggcgtcgtttgcgatgggggtcctgccctgtgctgactgtaaacctcttgaagcacatcaacaatgcgccagcacgtcctgagagtttgtggactgaagttattccaaattctaaaatgtaaatccactaaaagaaagtataagaactgtagcctgaactcgccaaaaacaagtcccccaaatgtgtgtaatggcaggggtccccacccctcccgcccccctgggccccctttgaatcccccctacagacgccgacttgttaggaaccggcggcacagcaggaggtgagcagctgagcagcaggtgggccggcaaagcttcatctatacttacagccactccccatcgctggcgttaggcctgagctctgcctcctgtcagatcagcgtcggccgtagagtctcataggagcatgaaccctattgtgaactgcacgtgtgagggatctaggatgcacgctccttatgagaatctagtgcctgatgatctgtctctgtctctgccacccccagatggtgtgtccggaattggtgggttcttggtctcactgacttcaagaatgaagccgcggaccctcaaggtgttacagctcttaaggttgcgcgtctggagtttgttccttctgatgttcggatgtgtttggagtttcttccttctggtgggttcgtagtctcgctggctcaggagtgaagctgcagaccttcacggtgagtgttacagctcttaaggcggcgcgtctggagttgttcgttcctcctggtgggctcgtgggctcgctggcttcaggagtgaagctgcagatcttcgtgctgagtgttacagcttataaaagcagtgtggacccaaagagtgagcagtatcaagatttattgcaaagagcgagagaacaaagcttccacagtgtggaaagggacccgagcgggttgccactgctggcgcgggcagcctgcttttattcttatctggccccacccacatcctgctgatgggtagagccaagtggcctgttttgacagggcgctgactggtgcgtgtacaatccctgagctagatacaaaggttctccacgtccccatcagattagttagatacagagtatggacacaaaggttcttcaaggccccaccagagcagctagatacagagtgtcgattggtgcactcacaaaccctgagctagacacagggtgctgattggtgtgtttacaaaccttgagctagatacagagtgctgattggtgtatttacaatccctgagctagacataaagattctccacgtccccaccagactcaggagcctagctggcttcacccagtggatcccacaccggggctgcagctggagctgcctgccagtctcgcgccatgcactcgcactcctcaggccttgggtggtcgataggactggccgtggtggagcagggggcggcgctcgtcggggaggctcgggctgcacaggaacccacggaggcggggtaaggctcaggcatggcgggttgcagtcccgaggcctgccccgcgggaaggcagctaaggcccggcgagaaatcgagcgcagcaccggtgggctggcactgctgggggacccagtacacccttcacagccgctggcccgggtgctaagtcccttattgcccggggccagcagggccagccagctgcttccgagtgcggggcccgccaagcccacgcccacccggaactccagctggcccgcaggcgccgcacgcagccccggttcccgctcgcgtttctccctccacacctccctgcaagctgagggagtgggctccggccttggccagcccagaaaggggctcccacagtgcagcggtgggctgaagggctcctcaggtgctgccaaagtgggagcccaggcagaggaggcaccgagagcgagcgagggcggtgcggacttccagcacgctgtcacctctcaatgggaccatctagtttcaggaaaacaagctcagggctcccactgattctacattatagtgagttgtgtaattatttcattatatattattacaatgtaataataatagaagtaaagtgcccaataaatgtaatccacttgaatcattccaaacccattcccctgccctgtccatggaaaaaaatgtctcccatgaaaccagtccctcgtgccaaaaaggttggggaccactgttatggggtaaagctaataactctgcaaagaatagggcaagcctttgtaaaatacatcaacattcacttgatttcctgccactgcaggaatgcctaagaacgtttcagggagtggagctaaccgtggttgaaccatgacagtggccaggtccccactctggcgcccgtatcagctgcaggagccgcagtgcatagcgtgtgcgctggccctgcaggaagaagaggcaggcccatctaggcagcagacaccatgatggagcatggtggactcctcagcaaccagctcttggtggctgccaggattcatcagttgtggctgcaccaaatctctttcttccaccactcccaacggcccgttatcctgggcttctgtttattgggatttcctggaattccaggagtcccatgtggcaataagatgtcaagtgatgccacaggcccttagggaaggtcctcattttggctccagatccagccaggcttactccctgatcctgactgagtgggccaaggcgtgggccctagggacgggtcctccaggtgaggtatccttagttcatgtcagttatggtcccattgatttattttctttctttctttctttctttctttcttttttttttttttttttttgagatggagtctcactttgtcacccaggctggagtgtagtggcgcaatctcggctcaccgaaacctctgcctcctgggttcaagcgacacccctccgccacccacctcagcctcccgagtggctgggattacaggcgcatgccaccatgcctggctagtttttgtattttttgtagagacggagtttcaccatgttggccaggctagtcttgaactcctgacctcaggtgatctgccctcctctgcctcccaaactgttgggattacaggcgtgagccaccatgcccggccccattggtttattttctgtattatcatggagctcttcttggtttacctgaggtgtttcgatattaaccctaactgagggcaaaatgttttattagatagattggtggataggtagatatgtgatacagcaaacatagcaaaacatttattctagaatctggttggtgcctgttcattgtacattttttccagctcctatctacgtttgaaatttaaaataaaagttggggctggaaattgtgatagaggtgcttattatacaatttacagggatttaaaaaaggtatttttcaagccggacatggtggctcacgcctgtaatcctagcacttagaaaggctgaggtgggtggatcatttgaggtcaggagtttgagaccagcctggccaatatggtgaaaccctttctctactaaaaagacaataaattatccggacgtggtagcacacacctgtagttccagctacttgggaggctgaggcaggaaaatcgcttgaacccgggaggcggaggctgcagtgagccgagaccacgccactgcactccagcctgggcagcagagcaagacttggtctaacaacaacaacaaaagatatgatacatttctttggtcagtcattgcacatctatttgctgggtgtcaattatatatggtactgaatcctgaagactcaccagggaacaaaacaggtgcaatcttcccctcatgtagtttacagcccagaagggaagagagatgaccgaacaagtaattccagtagagtgtgaagagttgctgtaagcatcaaagtgttggggggagttagtctcttactagcccctcccaagaccctgcacccctcctacttgtgcacagagtcccagccctggccttcctagggtgttgacatcactgctgcttgcagtacaccctgcaccagctaggccttagctggctccagagtgtggcaggggtgggtgattgcagagatactttcattccaacaatggtcaagtctagttttctccttagttactttagggtgctgtactggcttcctagaactgctgtaacaaattatcacaaaattggtggcttacagcaatagaaatttatactgttacaatcctgggaaccagaagagtccaattttaaggtgttggcagggccgcttccccctggtgtgtctgcaggagaatccatcccatgcctctgtgctggcttctgctggctgccggcagcccttggcgtcctttagctcgttgatacatcagtacaatctcgacttcggttatcacatctgcttctcctctgtgtgtcttctcctttttcctcctcttctttttttttttttttttttttgagacggagtctcgcactgtcacccaggctggagtacaatggcaccatctcggctcactgcagcctctgcctcctgggttcaagcgattctcctgccttagcctcccgagtagctggcattacaggcgcccaccaacatgcccgtctaattttttgtatttttggtaaagacggggtttcactatgttggccagtctggtctcaaactcccgacctcatgatctgcccatctcggcctcccaaagtgctgggtttacaagtgtgagccactgcgcctggctctttttttccctcttatgagaacacttgccattggattttggatccacccagataatcgaggatgatctcatctcaaaatccttaattacacctgcagagaacttttttcaaatgaggtcacatgcacaggttctaagaggacgtatcttttggggaggccaacactcagcccgctatgagtacacctatctcataactaagagactcatagagcacatggtctctctcctctttttaacatgtcgtgggcttattttgtcataggatattttcctctgtcttgggtctgatttcttcactcattatttaaaaaatttctctcggtctgaaccatgatgaatgaattctgagtgggttattgccattctccaaagttttcctcctgtgcccaaatttctcctcgatagtggttcattcctctacatacagagagctatggaggtacatggaaggtgctatggtttgaatgtggcctctccaacattcgaatgttggaaacttaatgcccagtgcaacagtgttgggaggtggggcttgatgggcccgatgctgctataacaagggctttggggcatgggtctgcttgcctctgctcttctgccatgtgaggacatgacgcttctccactccagaggatgcagcattcgagaccatctcagaagcacagagaccaggccccaacctgccagtgccaggatctgggacttcccagcctctaaaactgtgagaaattaatttctattgtttatttatttatttacttatttttgagacagagtctcactctgtcacctaggctggagtgcagtggcacgatcacagctcactgcagcctcgaactcctgggctcaagcgatcctcctgcgtcagcctcccaaaaagctgcgaccacaggcacgagccaccatgcccagctaatttttgtatttttgtaggtggggttttgccatgttgcctgggctagtctcaaactcctgagcttaatcgatccttctgcctcagcctcccaaagtgctaggattacaggcatgggccaccatgcctggccccaacatgtgttttttaagggaacacaaaacacaatgcaacccataacattaaatgatcacctttgcgtttagaaagaccctgcacattgcctgcagtgtgcagcgtgtggtagagggtagcagctcaccacacattccagttggcaaatgtttgtagtaatctcaacaacagaccatggtgagtgggcaatgcccatagtggcaaagtaggataaaaagaagtgggacaatagaaaacaacgtagcggctagccccagtgtgactcagtcactgaatggacctgtgctgggacagcgagagaggctccacctgtagatgaggggtcagggttccatgtcccacgcaaatccccattcccgtcagatacactcacagggccttcatgaagcttaatggtcagtgtaggaaagagtccccgcttcctggttccccgcgccctggagcctcactccactctgggatacaccccagccatcacacccaaattatccattcgctgatcggcggtagataatttggtgtattctgagcttcaggaggaaaaacccctctgtttacttttggaattagtaaacttccatttcatgtttttccctgaagggtgtttaatgtgaggtccttttttctctctctccctacttttttaagggaacagcattagtctgagggctacacaaaggatgcttgttgaattctgtcaaagatctgcacaagatgagtgacagttaggtagacctgtctgctttctgaaatttcacatgtttgcattgaatccccgcctgaaaatgtacatataattttagagatcaggtcagggactctagacattctgttagatgtctccccctatatgtcctccccttcctctgtgatagcagaaacctcaactttttttttgagacagagtttcattctttgttgcccaggctggagtgcagtggtgacatcttggctcactgcaacctccacctcccgggttcaagagattctcctgtcttagcctcccaagcagctgggttacaggtgcctgccactacgcctggctaatttttgtatttctaatacttttagtagagacggagtttcactatgttggccaggctggcctcgaactcctgacctcaggtgatccatccaccttagcctcccaaagtgctgggattacatgcgtgagccaccacgcccgacctaaacctcaactttttagctggacggacatgtgactgccctgaagaaaccttgcgtttcttcaccacctatgcagctagaggtgaccatgtgggctgttaatggaaacctagtgtgcaactcttgggaggtgcccttcaagagagggtgcaaaccgggcggtggctcacacttgcaatcccagcactttgagaggccgaggcaggcggatcacctgaggtcaggagttcgagaccagcctgaccaacatggtgaaaccccgtctctactaaaaatacaaaaattagctgggcgtggtggtctgcaactgtaatcccagatacttgggaggctaaggcaggagaatctcttgaacctgggaggcggaggttacatgagctgagatttcgccactgcactccagcctgggtgacagagcaagactccatctcaaaaaaaaaaaaaaaaaaagagggtgtgcaagttcttctttcctcccattcttcccacttgctggttagtatttggatgcactggcctgagtctgcgtagtcttctggggccttgaggcagaagctacttactaggattgtagagggatgagggacaaggcagaaggaggccgagcacttccaggtaccctccgtcctggccccagctgcctatatttatttaagagagaaacaaacagctatcttgaggggtagacagaataatacttccctccttccccgaaaaagatgcccacatccttgcccctagaaatagttgatatattgcttgacctggggaaagggactttgcagatgtgcttgaggaccttgagatgggggcgggggttagcctggatgatcctagttattctgggtgggctcaaagtcatcataagggtccttatatgagataagcaggaagatcagagacagaaaaacaacctgtgatgacaggagtggccaaggttgaagtgaggcaccttgaatatggaggcaggcccagaggtcaagaaagaatgcaggcactgcaacaccctggaaaaggcaaggaaacacgctctcccctggagcctccagaaagaactcagcttggcccacaccttgattttagttcctcaactctcattttagagttctgaactctagagctgaaggataatacatttgtgttgttttaagctagtaggtttgtggtcattggctacagcagcaattggcaacttatacacttcatcttgcttgagcgactgttattttgtaatttcagacacttgcagctacctccagtcctaaccaggacaaaatctggtatctggaagtgggaaaatgtatgttgcagaacgtaggttgtggcactgacttagcaatgacatgcccgggactcatatattgcaggttcggaaaaatgatggtcattaggacatggcaatgggacacttggtggcatgtttccagggttactttagaaggcatactatatgctgaccaaggctgagagtcaggaggaaatggttggaagatcagaattttgggcacagtcagcttcttcctgccacgtcctgcaaaatccaaaagaaaggtgaacttgaggaaagccagccagtctgtcaaccgaatgaaaaacatcgttttggcaaaggagccctctctgcctgccacttgcaagcaaatttgagtgataagctggtaatttggggccttgctggactgaaaaacccaatggcttctgtattccaagtaaaggttttaccgaggtctcaatgttttgcaaagggctttacatgtccaattctctgctagacattgagagccagtccagaggcaaacatgttggggaaggtaacttttctttcagttcgtgggtttccagcctacaaagagcccttctagacttatggagagctctgaacaccaccccagggtgcaggacttggagctggaggaagtgcattggtgggactctgaagttgttgcccttggtaaggctatgaatatgtaccacgtgtgggaggagagatgtgtatggatatcaggcggctaagagggcaagctgtggcagtttgcttttctcctcctcttctatagcagaatcctggcatgtcttgaatgagttatgtgtgtattcagatactggggtcctcaatttccagggcagacaagtaagccctggaacagcgtcgagcctctggccacgatcagctttgtcctttcgccccagtgtactgttataaggaaatggttggggcattatgaagttaaggtgagcatagtctacacatgctcaccctcactcctgagaacaattaaaagtatgggggattccggccgggcgcggtggctcatgcctgtaatcccagcactttgggaggccgaggcaggtagatcacgaggtcaggagatcgagaccatcctggctaacacggtgaaaccccatctctactaaaaatagaaaaaattagccgggcatggtagcaggcgtctgtagtcccagctactagggaggatgaggcaggagaatggcatgaacctgggaggcggagcttgcagtgagccgagaccacgccactggactccagcctggacaacggagcaagactccgtctcaaaaaaaaaaaaaagtatgggggattcccaaaaccactctcagttttgataattcactagaaagactcacagaactctctgaaacctggtgtacttatggttacagtttattacagcaaaaggatacagattaaaatcagccgagggggctgggcgcggtggctcatgcctgtaatcccagcactttgggaggccgaggctggcggatcacgaggtcaggagttcgagaccagcctgaccaacatggtgaaacctcgtctctactaaaaatacaaaaattagtcaggcgtggtgttgcgcatctgtaatcccagctacttaggtgtctgaggcaggagaatcgcttgaacccaggaggtggaggttgcagtgagccaagatcctgctacttcactccagcctgggtgacagagcgagactccatctcaaaaaagaaaaaaaaagagaagaagaacatagggtagagtccaggaaagaacccatcacagagcttccattgttttctccctgggaagccatggatagtgccactttcctggcattaacgtggacaacacacatggagtttgcccaccagggaagcccacccaagcttagagtttttattggggttccattgtgtagtaatgattgatttcccatgtggttgatcgcagcctccagcccctctggatgttgaactaatacgacgtgaccccaaccccctccctaaatcacactgttagacttcctggtgtggccagctcccaatctaaacaaagatactcctatcgagcatgattttccaagggctgagagattacctaccagaagctgaaggcaaaggatggacctctctttgggcaaggtcaaattctttattacccagatgcattgttctacaataatggaacctcaatttctaactgagcacaaagcagccacaatcaagaatcccaacctctgccagaattccagccttttgtgcatctacttacatcccattgtaaccatgtgactaaattctagtcaatgggatgtaagtgggggttgtatttgccacttctgggaagtgtccttaaatagaggggccttcttttcctctgccttctgtctttttgcttcctatacgggacttgaggagccttcttggcccataggtaatgcttaggggtgcaacaaggtggaaagagcctgggttcctgttgattgaggcaccctttatacctgcaccaggctgcttggagaaaccacttctatcatgtttaagctgctgtcattttgggttttctgccatttgcagccagatatagtctcaacaccttgcttgaaacttacatttatattggttacatccagatttgtaaaactctgctcatcaaattgacgatctcatctttaatccagctcacactcatgctgccaaattgtagcctgtcactggaacactagacagggtactggacagttgcttctctggaacactggcctttattcccaagccttcatcacattcagaagggactgttttctttttctttttcttaagaaactcacagtctaccttttccaagtaaataatcatcacactttctgtggctaaccagttggagatttgactgaacacctaaactttactaatgttatatctaaactttaagtgaatttttgctacacctttaaaaaactgactaaaagatattttttaaatcaaaacgaacatttacagatctttccaagacctgatatttgaattttgttcatattttatcaaagtgggccagagtttcctatgtgcaatggcttggcatcgtgcctagagaaagcaggataaacactgaatctctgccttttattttttgtttttggtgtcttgccatcctttgttcttcataaagaccttatggtagcttttatgaatatctctaagaaattaatctttaaaatatagaaggtggacaaaaaaccctttgcacattgtgaagacagggattttatccttcgttcattgaagagcagcaagatattgggacttggatatggtgcaacctctgtcatcacctttcctgtttgtagtcttgggattggaggttgaaagagaatggaagaaatggcactagaaccccaaattccatttctttctttcttctttttttttttttttttttgagacagagtcttgctctgtcgcccaggctggagtgcagtggtgcgatctaggctcactgcaacctctgcctcccgggttcacaccattctcctgcctcagcctcctgagtagctgggactacaggcacccgccactacacccagttaattttttgtatttttaatagagaaggggtttcaccgtgttagccaggatagtcttgatctcctgacctcgtgatccacctgcctcggcctcccaaagtgctgggattacacacgtgagccactgcacccagcccaaaagttccatttctaatttgcctaccttaatgacttgattttcttattttcatagtaaataggaatatgtatgttgaagaaatatgaacattaattttctcataactgcacagtcaaaaacaatgttttaaactttaataaatatcaatgacttgtttcatactttgctccattacaaacacaaggaaagaaaagatgtacaatgcctgaggaatagaaacaccatcaatcctcaacagggtcacctaactgtcattatgaagcaagggactcttgccagagatttgtgtcctcagtgaaaaaggcctcatggaattttcttgctaaaaggaacctgagacttattgacacacgcgtcctccttttccagacgaaacactcaaggcttagggaagtcaaagtgtacagaaggtccccgctaattagcaacaaagccagactcagcacccaggttgttctcgctcctggatcagggttatttgtgaacatcccatgtcctctttatgatggttacagatgtttcatatcatcaaggttaagatgaaagatctcagaagctgcagaagtgcttagatgcacccacagaaaaccaccggatccagctaactcactcttgtgattggaaagaagcatattctggtgaagcaaaagatttctatctccagaataatgcagaaagcatttttacctaccaagccacaacaaaccagtgaaagaacatttagatttccagagtccatcggcaatacaaaagtcacctaaagaataatgccagaggcatatcttctcttgtaggttgtaaattccttgaaaacgagaactgctcaacttcccatctcctacgacacccagcacacagttgatgctggaatttctttttaatgaatgaaacacacaaatcattgctttaaaccctggaattgtgcccttttcaaaagaagcacttaatagacatgtgtctaatttcctgtgctgtcacaaatattatttaatcacactgttaaaaataaagaactctggggcccatgaactacattctccaggccattagctgctctttccactttgggcctctcagctgtgcagccggaaatggatcgtggggagaggagctgccactcttctgcaaatatcctggaatcttggctatgtcaggaagtgtttggagaatgccttggaagctgagaaagtgtttccaaagcagcatgcacacgaagatatttgaaccagagaacgtccactctgaaatagatgcatggagtgcattcacagaatatcacgtttttctgaagtttaaaagctacagcccagtactctgaacccaagaattaaggtaagtgtaaaaagtgagtgcctcagatagttgttatgtttgcaacaggtcacttggttttacatcaatctcatggtaaaatacatataaagtcgttatgaagctcataggcatattataatggttccctggtaaatgacactagcatgttgcataaacaactatatcttttaggctgggcgtggtggctcatacctgtaatcccaacactttgggaggccgaggctggtggatcacctgacatcaggagttggagaccagcctggccaatgtggtgaaatctcgtctctactagtggcagagattagaggcaggagccactgagcccggcctcttttaattgcttttttttaaaaaacggctttattggctgggcgcagtggctcacacctgtaatcccagcattttgggaggccaaggtgggcggatcacctaaggtcaggagttcgagaccagcctgaccaacatggtgaaaccccgtctctactaaaaatagaaaaattagctgggtgtggtggcacatgcctgtaatctcagctactcgggaggctgaggcaggagaatcgcttgaacccaggaagcagaggttgtagtaagccgagatcatgccattgcactccaggctgggcaacaagagagaaactccatctcaaaaacaaacaagcaagcaaacaaaaaaaccccaacaaaacaaacaaacagaaaaaactatatcttttaaaaatgatagtcaatgatttttcactgaaaaataggtattattcattaaaatctaagaatacaaaccagccacagtaagaaaactgtcctctcctctttgccagcagcctacacaattgagatgctgtgcagttttcccctcagctcgtaacactgaaacagcaagaaattgtctaaggttagaatttctagtcataggaaacttccagcgatgccaatgtaaaaacattttgtttcatttcagagagttaagagagcaaatcaagacatgaaaatgatccccccgtggaatatgcccctgctattgagagaataaactactgatctacgcaacagcatggatgaatctcagagacattttgctaactgagagaagtcagacacagaagacatagtcaatgattccatgtgtatgaaatttctagaaaaggcaaaactatagagacagaatggctgatcaatgttgtggctgatcaaatcgaggcacagaatgatcaatggttgcctggagctgcgggtgggaacaggagtgacctcaaaggagcaaggggaacttttgggggtggatgggaatattgggaaactggactgtgatggttgctaagtgcgtcagttcacggaaacctatcacactgtaccctcacaatgagtgacgtttatggtttgtaagttagacctcaataaagctgtttgtaatcattttatttattctttttttttttttttgagacaaagtctcactccatcacccaggctggagtgcaatggcacgatctcggctcactgcaacctccgcctccaaggttcaagcgattctcatgcctcagcctcccaagtagctgagattacaggcgtgtgccaccacactcagctaatttttttgtatttttcgtagagacggggtttcaccatattggtcaggctggtctcaaactcctgacctcaggtgatccgcccaccttggcctcccaaaatgctgggattacaggtatgagccactgcgcccagccaataaagccatttttaaaaaaaagcaattaaaagaggccgggcgcagtggctcgtgcctgtaatcccagcactttgggaggccaaggcaggcagatcacctgaggtcaggagttcaagactagcctggccaacatggtgaaatcccgtctctacgaaaaatacaaaaattagccaggcatggtggcaggcacctgtaatcccagctgcttaggaggctgaggctggagaatcgcttgaacccaggaggcggaggttgcagtgagcagagatcgcaccattgcactccagcctgggtgacgagcgaaactccatctcaaaaaataaaacaaacaaacaaaaaaaaaaacaaaaggcaattaaaagaaaggattctttcaaggccagtgcaaaactgctttgcagaaacaggtgacctcccttgtaatattcatggtagccatcacacttcccaagtgtgggacactttgtcctgagcaggggttctctgaggtgcacatccagatgctgtcacaccaaacccggcttggtgatctttcaaactccagaatttacaatttctaaacataatgattatgatattagtcaactcatagagtccaagaacatgaatacatggaactgagcaaaacaaacagcatttccctaatgtcgggggatggtggtatgactgggagccaaagagagctttgtgggcttttgctgaactacgcagctgttcggggcagctcctggaacgaggaaaggtatttcgggtatagactgaaataccttcactaacaactgtggaatgctggctatacacatcaccatcactgcagaaatgtggggaaattattttaggaaaatccatcttgctcagaggcaaaagaataaatcgaacattctgtagtccacctcaccagtgtttctatccacagcgaggggttttcaaacttgagtgtgagtcaaaatctcctgacctgttgagaaggcagattccctggcagggccccaaggccatacaactgaatgcctgggaccaagtgccggagtctgaatctttaactagccctcgaagtgatgagggtcctcaaaacacggcgtaaggaacgctggcctccagcaatgaagaaggtgaagacactcagtcagtctgtgctgtttgggcacctctgctgattttagttctgcttctttccattcctctctgtctcatctgcacatctcacgttgtgccttggtccttacctgccccatagccttgctctcagggacagaagtcccacccgtggtgaactggagacaaataattgttaaaaggttttctcttgcctgccccccttcccctccatgggacaagactataaccagaggctgattaagcctgtgcccattggcttctataccggttctcacttaatcactggagaggaagctgcagcaggttctaggttctaacaccctgctggggttttagattggtggctcatgcctataatcctgaagctttgggaagccaaggtgggaggatggcttgagtccagggatcggagataatgtctctacaaaaaaagtttaaaaaaaaattagccagaagtggtggcacacgcctgtagtcccagctactcaggaggctgaggtgggaggctgaccccaggagttagaggctgcagtgagccgtgatcccaccacagcacttcagcctgggcaatagagtgagaccctgtctctaaaatcaatccatcaatcaaaccgtgttgaaggggagggaagcatagacttggttgaattggacaaccgagcccaggacagagctctagtgaggccccctgttctgctgtcccctgggaagggagggatggcccctgcatgagagcacctgcacatggtggtccactatgctcttgattcctgggcttcagggaggccttgacttcccaccctcttctgcagcagcccagcctttgagtggtgacccttggctttctctgcaagattctccccacccacccagacccttgggggaagccttaggcagccagatccataacacgtgaccccagcccctaatgctcagaccaggagtagacttaaccaaaactggccaatcagagccccttttcctggaaacttaaacttctaagatattcccatcttggtgtgtgctggtttctcatacagagtaggcaaaatgctggggctggagcattgctgagtgagtggcatagaaagcttagatgaaagggaagcaggtcgtgagatggagagggcatcctgggtgactgcattcagcacccctcgggagtcagtcccctcccgaggcccagctgaggtcctgagctcagttccgtgagacaccccagtgttattggaataaagagcctttactgtggcagcgctccctaacgcaggaaggatcacatttcccttgccatctctgtccttgttttaacccgtactctctttccgtagacaggatggcaaaccatgttgtcctccttatagtgcaaaacgggaattttcccaaaaaactgatttggtttgaatgaactgtctttggcgatagtatgaaattattatttataggtgcaaaaatagaactgtgaacatgttttatcttaaaaagggttcttgtctattagagtaactttgaaatatttacacctgaaatgatgtcaggaatagcttcaaaacaatgccagggccaggtgtggtggctcacgcctgtaatcccagcactttgggaggctgaggcgggcggatcacaaggtcaggagttcaagactatcctggccaacatggtgaaaccccatctctactaaaaatacaaaaattagctgggcatggtggtgcgcacctgtagtcccagctactcgggaggctgaggcaggagaaacacttgaaccctgagatggaggttgcagtgagccaagatcgcgccactgtactccagcctggcgacagagcaagactccatctcaaaaaacaaaaacaaaaacaaaaaaaaaacaatgccagggaggccgggcgtgttggctcacgtctgtaatcccagcactttgggaggccaaggtgggcagatcacttgacttcaggaattcaagaccagcctgaccaacatggtgaaaccctgtctctactaaaaagacaaaattagccatgcgtggtggtgcatgcctgtaatcccagctacctgggaggctgaggcagcagaattgtttgatcccgggaggcggaggttgcagtgagctgagatcacgccattgtactccagcctgggcaacacagcgagactccatctcaaaaacaaacaaacaaaaacaaactaacaaacaaaaaaaacaatgccagaggacaggaagtgggtgaggatgtaaatgaaacaaggtcgaccttgagctgataattattgaatctgggtgacgagggttcattgcccaagtctgtcttcttctgtgtatgtttcaaattgtccatagtgagaagttttaaaaaatgctgatttaggggtatacctatgaaatatcacaaaaccaccagccttccaaagtgagaagaagctttttaaatgggagatctaagtgtggctccaaaggcagctacccctaatgggactgggtgtggtactgtgagtgtacaggtgtgtgaacaaaaacatatggggaaatgtccctctttcccttagaggaaaataggaacttgggcttcgtgttcaatacatctctgatgatgcaatccaaaaagaaatatgctaagctctatggcttgcttttaaattaataaaaggcacatttaactatatactttgtagattgtattaaaagttatttggtagatttaagggtaagaagcattgcctccaactagaacattttcctaataggttgaaagcatatgtgtcgaaagtaaagcattttgggagttctccagcagctataaaaaactcaatgtatctatgcataccttctaatttagaggagcgagtgggaggtaggaggtggccgatgcttgttggatattcaagagcatctgtattcacttttttataaattcattatggttaagagtggtcttttgtaggggtttggatttcgggagaaatcattcataatacaagttttcctttaaagttgtgactgtccattgtacccttacgctcgccccgttttcaaggaggccaagttctgttttctgtatgaggactcaagggggcctgctactcgaatgccccgtcgctgtctaattctgtggttaatctcatagtgtggacacacttgggggcccagctctgagaccaggagtccccaaccactctgttcatgtctgaatgtctgtcccttttcatttcccccttctttccatctactccataatgtctgcagtggaggtgcttgcatacttcacttgtactttgcaatatttctctttcttttttattgtcattatattttttgagaggcaatcttcgctctgttgcacaggctggagtgcagtggcaccatcttggctcactgcaactttctcctcctcggtttaagcgattctcctgcctcagcctcctgagtagctgagattacaggcgcccaccaccacatgtggctaatttttgtattttaatatagagacggggtttcaccatgttggtcatgttggtctcgaactcctgacttcaaatgatccacttgccttggtctcctaaagagctgggattacaggcatgagccaccgtgcctggtcatcttttaactgatctttccactgtagccttctgcttttataatatatgtgtattcagagaaatgcatcctactctctaagttattggccctttgggtccaacaataaaagactcactctctacttcatggaaacaagagttcattgtaagaacacttttcattaagacacattgagaccaaaaataaaaccgtgtttctccactcaggagccaggtacccctcgtcatcacatctccacgtattcatgagctgaatgagactaaaggtttaaagttacaagggcggtattttaaaatgtttctgttggccaggtacagtggctcatgcctgtaatcccaacactttgggaggccgaagtaggaggattgcttgacctcaagagttcaagaccagcctgggcaatatggtgaaaccctgtctctacaaaaaatacaaaaaagtagctgggtgtggtggcactcaggtacctgggaggctgatgtgggaggatcccttgagctggggagatggaggctgcagtgagccatcatagtgccattgcattccagcctgagtgatagagtaagatcctgcctcaagaaaacaagtttttgttgaaataaaatatttacactaaacaaaaaataaagcaaataatattctagctaagtcatggaccaattaatagttgacattattttttccgagagaataatattaaccagaagtaaaacctagagcaggcctctcatcactacattccaaacccaagctaaattttagttaaattgtacatttcagattttgaaataatgcatcatttaaaatattttaaagaaaaatgcaaaggcctttcaaaccacaatttcttctatggattatatctctgtagatgtgcctgactatgaaacaaactactataatatcaattattaggccaggtactgtggctcatgcctgtaatcgaaacactattttttttttttatttgagacagagtctcgttccattgcccaggctggagtgcagtggtgtgatctcagctcactgcaacttccacctcccaggctcaagcgattctcatgcctcagccttccaagtagctgggattacaggtgcacaacaccacgcccagctaatttttttcatttttagtagagacagggttttaccttgttggccaggctggtctcaaactcctggcctcaagtgatccatccgccttgtcctcccagagtgctggcattacaggagccaccatgcccagtccatacttgctttagatcattttttcgagatcatagtggaaggcacctgtgtacccctctcacgtcaaatgcatctttctatctcccagaggcaagaactattctgaatttgatgattacgctccccatgtgtgttgttatataattgctctaagtgtatgaacccataggggatatgtaacattggttttaatgttcacaaatttaaaacaaatgctatattactctgcagcttatttttttctgtgtattatgatgttttcaagatatattcatatcgggctgggcatggtggctcatgcctgtaatcccagcactttgggaggcgggtggatcacgaggtctagagatcgagaccatcctggccaacatggtgaaaccctgtctctactaaaagtacaaaaaaaattagctgggcctggtggagtgcacctgtagttccagctactcgggaggctgaggcaggagaatcacttgaacccgggaggcggaggttgcagtgagccaagatcatgccactgcacttcagcctggctacggattgagactccgtttcaaaaaaaaaaaaaaagatatatccatattgacattttgttttgttttgttttgttttgtttgagacaggatcttgctctgtagcttatgctgtagtgaagtggtgcaattatagctcactgcagcctcgaactcctgggctcaatccatcctcccaccttggcctcctgaagctgggactataggcatgaaccactatgcctgggtaaatttttcttttttcttttccttttttttttgtagggacagagtctcactatgttgcccagggtgttcttaacctcctgggcacaagcagtcctccttccttggcttcccaaagtgctggaattacagctgtgagccaccacatccagctgatgtattgttctagttcatgcttttttttttttttgagacagagtctcactctgttgcccaagctggagtgcagtggcacaaactcagctcactgcaacctctgcttcccaggttcaagcaattctcctccctcagcctcccgagtagctgggactacaggtgtgttccaccacacctgactactttttgtatttttagtagagatggagtttcaccatgttggccaggctggtctcgaactcctgacctcaggtgatccacccacctcagcctcccaaagtgctgggattacaggtgactgcagggtattccactgtgtaaatgttctgtgctcttatgatccattctcctgttaatgggtctttaagttgtttatcatattttattattgccaccaatgttgcaaaaacgttcttgggcacctctcattctgcacttaagctaacatctctgtagaatatgcacaggagctgagagggctggataatgagctttaccacctattgacacaaattgttctgtaaagggacttctgctcctactggctgtgtatgaaatttgctgcttgtctacaccttgaacagtgacacagaggctgtccttccagtcattgtatcagctgtgtcttcgaggagccattgcaattttctgtcaagccgactgcatctacatggggtggtatgtggttctatcattggaccccagggtcacaggcccactctgtaccttcttggctctgaaatgggtacctggtcacttctatgtcatataggattccttgtctgtggattaggcattctgtgaacccccagagagtggtgtgtgcaggaaagataaatccagaatagacttggtgcgtgtgtggaaggatcatttggcatggaaggggctcagtgtagacaggtgctaccaagggattggttggtctcgttgaggaacactgtcttatcgggagctcgacatcggtctctgttgctggcagttggacatttagaagcggcagtagctagattggccttggtaagtgggagtccacgctgttgctcctcccgtagcctccatatatgccaaggggaatcctattcagttctccttgctatggactgaagcttgtgtccttagattcatgtgtgaaagcctgatctccagtgcgatggtattaggagttgaggcctttggccagtgattggctcgtggtgggggagccctcctgaatgtaattggtgcctttgtaagagacaggagagagcttccattctctctctctcttcaccatgtgaggaaacaatgaaacaactgcattctgcaaaccaggaagagaagcaaattggccagcaccttgaccttggccttcccagcttccataactgtgagaagtaaattactgttgtttaagccacccagtccatatgaatttgttgcagctgaactgactaagacacctgtcatgccagttccctagcagccagtgagaaagactggctcatgtgaacttggctgttgagtgtcccttctataggggatactttctccttctcccccccacccagccccccatagctttattgagacataatggatataaaataagctgcaaatacttaacgtttacaaaatgagttttaacataagtatgtatctatgaagccatcacacaatcaatacaatgaacatatccatcactcctaaaaatgtccctttgtccttttgtaatccctccccaaaaactttttaagggacacttggaatgtgcttatctcagtggaaactgacttaggtaaatagttcagagaaaccacctgcttctccatacccctgacttctataaataaggatcaccataagaacacagaattaccagaaggtatatttttctttaaaaaaatttttgttggggccagggtcggtggctcatgcctgtaatcccagcactttgggaggctgagacaggaggatcacttgagtccaggcgtttgagaccagcctgggcaacacagtgacaccccgtctctacaaaataatttaaaaataagccgagtgtggtggcactcacctatagtcccagctactcaggaggctcaggtgggaggatcacttgagcctgggaggttgaggctgcagtgagccatgacggcaccactgcattccagcctgtttcaaagaaaaaaaaaactgcattataactcatataccataaaatttacccctttaaagcataaattcagtgtatagtcacaaagttatgcaagtcttgctactatttaattccagaacctttttatcgtccccagagggaaactttgtattccttagcagtcactcctcaatcccttttctccccagcctctggccaccacagagcagctttctgtctgcttggatttgtcagttctgagcattttatgtaaatggaatcatacatatgtggcctttttgactgacaggcttctttcacttagcataatcttttcaagtttcacccatgttgtggcatgtatcagtacttcattcctttttgtggacaaacaatattccattgcatggatatagccatattttgtttatccactcatcggttgatggacatttgagtggtttctatcttttggctgtgataaataacactgctataaacatttgtacacaagtttttgtatggacatgttttccactctcttggatgtcaacctaggagtagaattactaactcattttgtaaaatatacgtttaactttttgaggaactgtcagactcagactgtttttcaaagcagctacactactttatattcccatgttccaatttctccatgtcctagccaacatttattacctttttttttttttttttttttttttggtggtggggcagaaggacagggtctcactctattgcccaggctggagtgcagtggtgccatcttggctcactgcaaccttcacctcccgggttcaagcgatcttcccctctcagcctcccaagttgctgggactataggcacacgctgccatgccagccaactgttttgtaattacctcactttttaatgatgtccatccaatgatgtcaagtggtatctaattgtgttctgatttgcatttccctaataactaatgatgttgtatatgttttcatatgctcactgaccttttgtgtattttctttggagaaatgtttatcaaagtcctttgcccattaaaaattgggttatttatcttttattattgagttgtaagacttatttacacattgtatatacagcccttctatcagatatgtaatatgcatgttttcccctcattctgtgtgttatcttttgactttcttgacaatgtgtttggaagcacaaaagatcttaattttgatgaagttcaatttatttctattttttcttttgttgcttttgcttttggtagcgtatctaataatcattaccaaatccaaagtcataaagttttacttctatattttttctaaaagttttataatttagctcctaaatttagtttttcaatcatttttagttaatttttatatatagtgtgaggtaggactataacttcattcttctgcatatggatatccacagtcccagcactgtttgttgaaaaaactattctttgttcttttgtgaaatttttttagttattctgagtctcttgcatttccatatgcattttaggatcagctgatcaatttcaataaaaaagacagaggaagctaggatttggatagagatcacattcaatcttagatcagcttggggagtattgctatcttaatattaaatctctcaatcaatgaaactgggaaatatttccatttgtagatgacttctctaattttttccaatgatattttctagttttcagtgtacaagtgtaatctttctttggttaaattttttttctagtgttttatttcttttgatgctaaagtaaataaatgtttttcttaattttaattcagaaatttaatttttaatttagattgttctttactagtatatagaaactcaattgcttttttgtatattgatgttctatcctgtaattttgctgaattcatttattagttttggtgaatttcttagaatttttgatatgtaagaaatatttgatatttttgcaaataaaaatatttattcttcttcctttctgatgccttttatttctgtttgttgcctaattggtctgactacaacctccaatacaatgttgaatagaatggcaagaggaacgattcttgtgttgttccttatctagggggaaagtattccatttttcactgttaggtatgacattggctttgagtttttcattgatacccttatcaggttgaggaagttccccgctattcttagtttgctgattgttttttttatcatcaaagtgtgttagattttgttaaatgctttttctgcatcattgagataatcttgtgttgtttcccctttttacattaatatggtatattacattaattaattttcaagtattaatttaaccttgcattcctgggataaatctcacttgataatgctctataatctttttgtacattggtagatttggttttttagtattttttttgaagattttcatattaacatttataaaggaggctacatgtggtggctcatacctacaatcccaacatttttggaggccaaggctggaggatcacttgagcctaggagttcaagaccagcctaggcaacatagtgagatcctatctctaaaaaaaaaaaaaaaaatatatatatatatatatatatatatatatatatatatatatacatatatatatatatatagacatgtcataagaaaaatcactgaagaactaaaaagttagtggggaattttctggccaaattcctgagaaaaacttgaaccagagaggtaagaggaatattagtacacctaagatattttttaactctggatatttatgatgctacaaatttgagctttgattctctggcttcaagcgggagacagaagtcaaggatcaggactccctagaatacccacatttggctgaaaccccgaagtactccactttcaacattagagtacaataccatcaccacttcccctggtaaagcatttgagatattacatgaattttagaagaagcaagttcaaatcttctctaagtgaaagcattctcatgctaggtattatagaaactgctcaagtgatttttgaacagcaataatcagcaagcaggaatacaaaaaactttagctaaatacaacagaaaaaaagacagtaaaaacagatctaaaaaacctgcaaatattggaattatccaacagattattcaaccatgattaccatgttggaagaaataaaggataaacctaaacaaatgttcagagaataagaacctattaaaaacaacacagtaaaactaattacaacatctaaactaaaaataatataaatacaattaaaattaaaaagaggtgcttggcaaagtattggacagtgaaggaagtaagaattgatgaaagttagatgagaagaaatttgcaatgtgtaatgcacactttttaaatatttatttatttatttatttatttatttattatttttttgagatggagtttcactcttgttgcctaggctggcgtgcagtggcgtgattttggctcactgcaatctccacctcctgggttcaagtgattctcctgcctcagcctcccaagtagctgggattacaggcacctgccaccacgcccaactaattttttgtatttttggtagagacaaggtttcactatgttggccaggctggtctcaaactcctgatttcgggagatccacccacctcggcctcccaaagtgctgggattacaggcatgagccaccacgcctggcagactttttttaaaaatgaaaaataaagaagagaggttaggacatatacgtaggataatgtcataaatctaacacatgttagatggaaattacataacaagaaaacatgagagactggggaataattaatatttaaaggaatagaataagattttctagatatgatgaaagacaccaatccattaattcaaaataaccaacagtttccaggtagaataaataaaaggagatccatatctggatatatcctaatgaaatttcagaatactttggtaaatgaaatcttaaaagccaagggggataagaggtagcctttttaaaaatgaaagtatttagattaacagctgactttttaatttttgtgggtacatagtagatgtctatatttatgggttacatgagctattttgataaaggcatgcaatatgtaataatcacatcagagtaagtgggatatccatcccctcaagtatttatcctttgctttttgtttttgtttttctgagagggagtctcgtcctgtcacccaggctggagtgcaatggtgcgatcttggctcactgcaacctctgcctcccgggttcaagcgattctcctgcctcggcctcctgagtagctgggattacaggcacatgccgccatgttcagctaatttttgtatttttagtagaaacggggtttcaccatgttggccaggctggtctcaaactcctgacctcagttgatccgcctgcctcagcctcccaaagtgctgggattacaggcgtgagctaccgcacccagccaagcatttttcctttgtattacaaacaatgcaattatactcttttagttattttcaactttcagtcatttaaaaatgacaattaaatggctgagcgtggtgctcacgcctgtaatcccagcactttgggaggccgaggtgagtggatcacccgaggtcaggagttcaaggccagcctggccaacatggcgagaccctgtctctactaaaaatacaaaaattagctgggtgtggtggcgcatgcctgtaatcccagctactcgggaggctgaggcaggagaatcgcttgaacccaggaggcagaggttgcggtgagctgagatcgtgccattggacttcagcctgggcaacaagagcgaaactccgtctaaaaaaaaaaaagacaattaaattattttttactatactcaccctgtcatgctaacaaatactaggtctcattcattctgtttaacatttttggtacccattaaacatccccacttctcctgccttccattacacttcctagcctctggtaaccatctttttacctccatttccatgagttcaattgttttaatttttagctcccacaaataagtgagaacatgccatatatgtctttctgtgcctggcttatttcacttaacataatgatctccagttctatgcacgttgttgcaaatgacgagatctcattcttttttgtggctgaatagcactccacgtgtctattatataccacattttctttatccattcagctgttggtagacacttaggttgcttccaaatctagattattgtgaatagtgctgcaataaatgtgggagtgcagatacctctttgatatacagatttcctttcttttgggtgtatacccagcagtggggttgctagatcatatggtagatctatttttagttttttgaggaacctccaaactgttctccatagtggttgtactaagttacattcgcaccaacagtatacaagagttcccttttctccacatcctcaccagcatttgttactgcctgtcttttggatacaagccattttagctggaataagatgatatcgggccaggtgcggtggctcagcctgtaatcccagcactttgggaggccgaggcgggcggatcacgaggtcaggagatcaagaccatcctggctaacatggtgaaacctcgtctctactaaaaatacaaaaaattagccgggcgtggtggcgcgtgcctgtagtcctagttactcgggaggctgtggcaggagaatcacttgaacccgggaggcggaggttgcagtgagccgagatcacaccattgcactccagcctgggcgacagagtgagacttcgtctcaaaaaaaaaaaaaaaaaaaaaaaaaaaaaaaaaaaaaaaaaaagagatatcttactgtagttttgatttgcatttatctgatgattaatgatgttgagcaccttttctatacgtgtttgccattcgtatgtcttcttttgagaaacgtctatttagatctttgcccaccttttaatcagattagaattttttcccatacaggtgtttgagctccttatatattctggttactaatcccttgtcagatgggtagtttgcaaatattttctcccattctgtgggttgtcccttcactttgttgattgtttcctttgttttgctgaagctttttaacttgatgtcatcccatttgtccatttttgcttaggttgcctgtgcttgtaaggtattactcgagaaatctttgcccagttgaatgtcctggaaagtttccccaatgttttgttttggtagtgtcatagtttgaagtcttaggtttaagtttttaattcattttgatttgatttttgtatatggcaagagatagggatctagattcattcttctgcatatggatgtccagttttcccagcaccatttattgaagagactcttctttccccagtgtaggtccttggcacttttgtcaaaaatgaattcactgtatatgtatggatttatttctgggttctctattctgttccactgtctgtgtgtctgtttttatgccagtaccatgcctttctggtttctacagctctgcagtataatttgaagtcaggtaatgtgattcctccagttttgttctttttggttaagatagttttggcttttctgggtgttttgtgatcccatatgaattataggattgttttttctatttctgtgaagaatgtcatttgtattttgatagggattgcattgaatttgtagattgctttgggtagatgaacatcttaaacaatattgattcttccaatcaatgaacatgaaatatctttccttttggtatgtgtatcctcttcagtttcttacatcaatgttttatagttttcattgtagagatcttttacctttttaattaattcccaggtatcttattttattcataactattgtaaacataattactttcttgattttttttcagattgttcactgttagcatattttttgtatgttgattttgaatcctgcaactttactgaacttgtttatcagttctaatagttttttggtggagtctttaggtttttccaaatataagatcgtatcatcagtaaacaaggataatttgacttcttcctttccattttggattcccttcatttctttccttgtctgattgctctagctaggacttccagtactatgttatataaaagtggtgaaagtgggcatccttgttgtaactgacttgtttttttgagacagagtcatgctctgtcgcccaggctggagtgcagcgccgcaatctcggctcactgcaagctccgcctcctgggttcatgcctttctctggcttcagcttcccgagtagctgggactacaggcacccaccaccacgcccagctaatttttttgtatttttagtagagatggggtttcactgtgttagccaggatggtctcgatctcctgacctcgtgatccgcctgcctcggcctcccaaagtgctgggattataggcgtgagacatcacgcctggccaacagctaaattttaacagcaatagtggtaactagaagagagtggcttgataactacattgtgctgaaaaatttaaaaaataactgctaaccagtaactctacaccaagaaaatttatctttctatattgagggcaaaataaataatttcagacttcaaataattttcaaataaaagctgagaaaatttattatcagtattaaggagaatctaaaacatatacataagccaataacaagcaaaaatggtaggccaggtgcggtggctcacacctgtaatcccagtactttgggaggctgaggcgggcagatcacgaggtcaggagtttgagaccaacctggccaatatggtgaaaccccgtctctactaaaaatacaaaaattagccgggcgtggtggtgcgtgcctgtagtcccagctactggggaagctgaggcagaagaatcgcttgaacccaggaggtggaagttgcagtgagccaagatcgtgccactgcactccagcctgggtgacagagcgagattctgtctcaaaaacaaacaaacaaacaaacaaaaaaacaagcaaaattgttgctagatacgtggggaaatggaagtaaatattaaatgtataaaacagaataataaagtctagtggaattagaaaataaagaattaaaatatttatataccataccacgtaggttgagtaagcaggtcagtggatggagtaagaggggtctaagatctttgttttacctagaagcaaggtaaaggtttttattatttttcataagttaagtaatacatactgtaatttataagtgaacaactaaaaacaatagaaacaaagtgtatgactttcaaactagtagaggagaaaaatcatatgctaaaaaatactcagtaaaaaatagacaataaaggataaaagggatatcatcaagaaacaaccataaaaatgggcaaccagcagccttcagggctgctctgtctatggagtagccattcttttgttcttttactttcttaataaacttgctttcactttaaaaaacaaaaaaggataaaagagaaaccaaagatgggaaaattatgatttagtggcaaattaaactataaatttatcaggagttacattaaacgtatgcacaaaaattgccatagttaaaagacaaagattgttgaactaggtaaaagtataaaatgcaactatatgcttttgataagacatacctaaaatgtaaaactatagaaaggtgaaaacaaaagcttgtagaaaggtatactatataaatactaagcaaaagaaaattgattagtaagacaaagagaatttaagacaaaaataattgttagagagattcccttcataaggttaatggttaaattcaccttaaaaattgttttcggctgggtgtggtagctcacacctgtaattccaacatgctgggaggctgaggtgggaggatggatcacttgagcccaggaggtctaggctatagggagccgtgttcacaccactgcactccagcctggggaacagaataagaccctgtctcaacaaaaaaatatttttttaaatttttgtgggcttagaaatataacttcaaaatacataatgcaatatttacagaattataaggagaattaaacaatctataatcacagcaagagattttaagacacatatctcagtaattaataaaacaagcagacaaaaaagtcagtattgatatagaacatttgaacaatagaataaatgaactaaagctggaggcatcacgctacctgacttcaaactatactacaaggctatagtaaccaaaacagcatggtactggtaccaaaacagaggtatagaccaatggaacagaatggagccctcagaattaataccacacatctacaaccatctgatctttgacaaacctgacaaaaacaagaaagggggaaaggattccctatttaataaatggtgctgggaaaactgactagccatatgtagaaagctaacacttgattctttccttacaccttatacaaaaattaattcaagatggattaaagacttaaatgttagacctaaaaccataaagaccctagaagaaaacctaggcaattccattcaggacataagcatgggcaaggacttcatgattaaaacaccaaaagcaatggtaacaaaagccaaaattgacaaatgggatctaattaaactaaagagcttctgcacagcaaaagaaactaccatcagagtgaacaggcaacctatagaatgggagaaaatttttgcagtccactcatctgacaaaaggctaatatccagaatctacaaagaacttaaacaaatttacaagaaaaaaatcaaacaaccccatcaaaaagtgggcaaagtatatgaagagacacttctcaaaagaagacatttatgcagccaacagatgcatgaaaaaaatgctcatcatcactggccatcagagaaatgcaaatcaaaaccacaatgagataccatctcataccagttagaatggcgatcattcaaaagtcaggaaacaacaggtgctggagaggatgtggagaaataggaatgcttttacactgtcggtcggactgtaaactagttcaaccattgtggaagacagtgtggcaattcctcaaggatctagaactagaaataccatttgatccagccatctcattactgggcatatacccaaaggattataaatcatgctgctataaagacacatgcatacgtatgtttattgctgcactatttacaatagcaaagacttggaaccaacccaaatgtccctcagtgatagactggattaagaaaatgtggcacatatacaatatggaatactatgcagccataaaaaaggatgagttcatgtcctttgtagggacatggatgaagctggaaaccatcattctgagcaaactatggcaaggacagaaaaccaaacacggcatgttctcactcataggtaggaatttaataaacaacaattagaatatccacaatttaaaaaattgagaagtgtagtttatataatttataaaaaagtaatctttagagatattagaattaaaagattcataaaggattgcgtcctaagagttggtgattgtggctaaaatgctaatttagggaaatttatagccttggatgaaaacattagaagtgaaaaaaaacactcaaattattttttcttttactttttcttttagactgtgcctcacatgatcatggcttactgtagcctcaaactcctgggctcacaagatccccctgcttcaacctcccaagtagctgcaactatgggcacgtgccaccatgcctgggtagttttcttattttttataaagatgggatctcactgtgctgctcaaggtggtctcaaactcctgggctcaaatgatctgcccacctcagcctctgaaagtgctgagattacaggcatgagccaccacacccagcctaaaaagctgaaaatcaaattaaatatctttcttcagaagtaagaaaacaaaaagcaaaataactcccaaataaatagaattataaaaattaaatataagcaaagatattataaaatagaaagcaagggccagcctgtaataccagcactttgagtggctaaagtggaaggatcacttgagcccaggagttcaagaccagcttggcaacatagcaaaatctcatctgtacaaaaattagacgggcatggtgacatggacctgtagtcacagttactcaggaggatgaagtggaaggatcagttgagctcaggaggtcaaagctgcagcaatccacgattggggcactgcattccagccagtccagcacagtaagaccctgtctaaaaacaaaacaaacaaacaaacaaaaaagaaaagaaagcagggggcaaataaagagaacctaaaagttggttctttgaaaagacaaacctctggtgacaatgatattaaaaagagaaagaaagaatatattagaagtgaggtaagaggatactactacagacagggtgtacattaaataaataataaagttgtattttgcaacactgtgttcaataaatgtttaaaattagacacaatggaaacaaatcagaaaaaaatgtataaaactgacataaatagaaatagaaaaaatgaatagtcctataacctttaaagaaatcaaatcaatgccaggcatggtgcctcacacttgcaatcccagcactttgggaggctgaggcaggaggattgtttgaagctaggagcttgagactgagttaggcaacatagcaagaccctgtctctacaaaaaaaaaaaaaaaaaaatttcttaatgtcctgggcatagtggtacatgcctgcagtccccacaacttgggaggctaaggtgagaagattgcttgagcctaggaggttgagactgcagtgagacaggatcactccactgcactccagcctggatgacagagcaagactcctcttcaaagagaaaagaaaagaaatcaaatcaaatcaacagtttaaaatattcccacaacaaaagctccatggctgatatgaattcgtttgtgagttatatcaaacattcaaaaaagaaattattatcatcttatgaaaaaccatttagaaaataggaaaagactcctcaatctattttagaagactttaataataatgataccaaattctggcagggatgacataagaaatccaaaactggccgggcgcggtggctcatgcctgtaatcccagcactttgggaggccgaggcgggtggatcatgaggtcaggagatcgagaccatcctggctaacaaggtgaaaccccgtctctactaaaaatacaaaaaattagccgggcgcggtggcgggcgcctgtagtcctagctactcgggaggctgaggcaggagaatggcgtgaacccgggaagcggagcttgcagtgagccgagattgcgccactgcagtccacagtctggcctgggcaacagagcgagactccgtctcaaaaaaaaaaaaaaaaaaaagaaatccaaaactaaacaaaatattggcaaacccaaaccagaaataaagtataatacatatggcgatgtgcagtggctcacacttgtaatcctaacactttggaggctgaggcagtaggattgcttgagccgaggagattgagaccagcctgggcaacatggctttaaacattaagaaaatacttcattttttctttaaagaaataaagaacaagtacaatgaatacagaaaagttacaaacatggtcaatattaattcaactatattgaaaactactttaaaagtgaatggtctttgggaggctgaggcaggtggatcatctgaggtcaggagttcaaaaccagcctggccaacatggtgaaaccccatctctactaaaaatacaaaagttagctgagcatggtggctcatgcctgtaatcccagctaactgggaggctgaggcaggagaatcgcttgaacccagaggcagaggttgtggtgagccaagattgtgctactgcactccagcctgagcaacacagtgagactccgtcaaaaaaaaaaaaaaagcaaatggtctaaatacaccaatcaaaagacagaagcagtggcttatacctgtaatcccagcagtttgagaggctgaagtgggccagaagtttgagaccagtcagggcaagatagtgagactctgtctctataaaaaataaaaaattagctaggcatggtggggcatgactgtagttccagctactcaggaggctgaggctggaggattgcttgaccctggcaaatcaaggcttcagtgaaccatgatcatgccactgcactccagcctgggtgacagaatgagaccttgtctcaaataataataatagtaataataataatagcagagatcaccttttaataattaaaaaaagacccaaaattcacacccattagaatggctactatcaataatacagaaaataacaaatattggcagggatgtggaaaagttggaatcctgtgcactgttgatgggaatgtaaaatgttgtagccactatagaaaatagtatggcaattctacaaaaaacttaaaatagagttttatatgattgagcaattccccttctaggtatagatataaaagaattgaatgtagaagcttgaagagatatttgtacatgtgtgttcatagcgttgttattcacaaaaacttaaaaagatggaagcaatccaaatatccatcaatggatgaatggataaacaaaatgtggcatatacatacaatagaatattattcaaccttacaaaggaaggaaatcctgacatatgctatgacatgaatgaacactgagaacattatgctgagtaaaacaggccagtcacaaaaagacaaatatgataggattccacttatttaaggtattgtgagtagtcaagctcatggaaacagaaaacagaatgataattgctggcgctaaggggagggggaaatggagagtggtttaatgggtatatagctttgtttttgcaaaatgaaaaagctctgaggattggttgcacaataatgtgaatatatacttcacactactaacctgtacacttaaaaatggttaagatgtaaattttgtgttttgtgtcttttactacaattaagaaaagcacacccaaaactatgacccaactacatgtcatcaacaaaaagcccaatttaaccataaagacatagactggttaaaagtaaagagatggggaagaatatgccatattaacactagttagaagaaagttgaagtaactatgttaatttcagacagagcaaacttcagggaaaggaaaacattcagggataaataggactttacatgattcttcaggaagatgtggcaatccttaaaatgtatgcaaccaccaacagagcaccaaaatagctaagacgaaaatggatagaactgcaaggaaaaatagacaaattaagatctattgtgatagatcaagcaggcagaaaatcagtaaggatatggctgaactgtgtattaatcaaccatcagtcaactgcaccattaatctactggatctaattgatgtttatagactatttcatccaaaaacagcagaatacccattcttctcaagttcacatggaatattcaccaacagagatcatattcttggtcataaagcataccttaacaaatttaaaaggatagaaatcatacaaaggatattctcacaacacaatagaattaaactagaaaccaataacagaagacagctggaaattcccaaatatttggacattaaacaaaaacacttctaaatagcatatgagtcaaagaagaaggtttaagagaaaatttacactattttgaactaaatgaaaaacgaaatacaatttattaaaatttgtgagctgcaagaaaatttatagcatgaaatgcacatattagggaaaaaaagaacctaaaataaaaaatctaagattctactgcaggaaactagagaagagaagagcctaaagcaagcaggaaagaactagtaaaaattagaggagaaaccaatgcaatcaaaaacaacagagaaaattaacaaaaccaaaagctgattctttgaaaagatcaatacaaatgattaacttctagccaaactaagaataaaagaaagaatatacaaatggctaatactagaaatgagaaagaggtcatcactgttgattccatggacagtaaaaagataataaagagggccaggcgaggcagctcacggctgtaatctcagcactttgggaatccaaggcaggtggatcacttgaggtcaagactggccaacatggtgaaaccctgtctctactgaaaacacaaaaaattagctgggcgtggtggtggacacctgtaatcccagctacttgggaggctaaggcaggagaatggcttgaacccaggaggcagagaatgcagtgagccgaaatcaggccattacactccagcctgggcgacagagcgaggctctgtcttaaaaataaataaataaataaataaataaataaataaataaataataataattaaaaaaatttatgaacaattccatgcaacaaatatgataactcagatgatgtcagtgaattccatgaaacacacaagttaccaacgctcatgcaaggagaaagaataatctgagtagaccaataagtaataaccttctcaaaaaatgttccatgtccagttggttttgctggtgagttctatcaaatattcgagagagaaatgatacccattctccacaatatcttccagaaaacagaatatactgttcatttcttttttctattttattttttaaattaaatctacagaaaagtgccaaaaaaaaccttattggcaaactaagaatagaaggacaaaattataaaactttattaagaaacatttaagagatcctaagtttatggaaagatacattgtgttcatgagttggaagattcaattttaagaagttgtcatttccttctgaatgggtttatgcactcaatgcgatgtcaaattcctaacggtgtgtatatttggggtgtgcgtgtgtgtgtgtgtgtgtgtgtgtgtgtgaatttgacaagctaattctaaaatgttaatgaaactataaagggataatagtagagggatttagttttgttcatttagtggtggtcacatagctccaaaagcagaaagagagggcaagccccattgccctgagcagtgcgagtctctgcttgtatcacatttgctatagttcaactgaacaaagcaagaccaagccacgggtttatgtggaggaggcaactcaaagatcttcatacatggagtgggagaatttcacaatacatggagtgtggacaatttcacaatctgccacgacaaggtgccacaatctgccacatcactagcaagtgatggaggctgtcccagtatgtcccaggcaatctgtctccggggttaatgtatggccttatctaccagagctgcaccgtccaatatggtagccactagccacatgtgtttatttaaatttaagttaattaaagtttcattactaacttaattattaccccaaattataaaattctgcttgtagccactagccacatgctagtagtggcttgtacaagccactcaatactacacgcatagaatattaccattattacagaaacttctattggatggcactgttttaaaatatactgcctctcttaataatattgacaatttttatattagaaatcaaacagtagattagttggattctcaaccatgttccgtgaagcctaaaagttctttaaaaacctaaggggtcttaggaaggatgggtccttatggtagacagctctaactgacaagtgtgccaacatggatgtgaatatcacaattttgcaacataaaagcaatatgtaagtatgctctaacctaaaaaaaagaaaaaaaattcttactacatcttaaagagtcatgttaaagctttttcaaacagaaaaatacatagctaagaaaccaataattatttgaacagttaactacaagataattaacttaatgggaaaaaaatgggttcaactgttgctcatgtttgcttcaaagaaatgccattcaactgcgaactttgcgcattcatcttataagtgaaagttctgatgtctgggggctgtaacccacatgctacagaaagtcatcagctccaagcattggtgggatgtgacagacaccgtacaggctatctgactcaacctccaatcccagtcttttccccttacttcctgtgattattgtagagtgaaactgaatgtttcactttcccagcctcgattgcatttatggatgggcatgacacacagttctggccagtgaatggaagtagcaggcttctgggggccttatttctggaaaaagtcaaagaatcttgaactcccgttgtctcccttccaatcctctctgcagttaacgttagatattttagtgccacatatgtaagtaactccacaatatgttgttgttattatcatttttgttagcccatgcattctagcagaaatgatattgctcccctgtcaccaggggtggggaagattctattaaaatgccttaaaaagctgcttgggaggatgttaatacaaaagtgacaaacattgctctagagagtcaattatctcttaaagaaaagttaaatatacaagaaaactacatttaattcatacccacatatttacaatttcccagtgcttatttacttattttatattttattttattttttgagacagagtcttgcttgttgctccaactagagtgcagtggcacgatcatggctcactgcagcctcgaactcccaggctcaggccttcctcccacctcagcctcttgagtagctgggactacaggtgcatgccaccaggcatggccagctaattttttatttgtagtttttgtagagacaaggtctcactatgttgctcagtctggtcttgaactcctgggctcaagagatcctcctgccttggtctcacaaagtgctgggattatgggcatggaccaccacccctggctttattttattttatttttttatatagagatgggttctcactatgttgtccaagctggtcttaaactcctggcctcaagcaatcctcctgcctcaccctcccaaaagtgctgagattacaggcgtgagccaccatgcccggctttattttattttatttttttacttatttattattattactattattattattattattattttgagacagagtcttgctctgttgccaggctggagtacagtggcacaatcttggctcactgcaccctctgcctcctgggttcaagcgattcccctgcttcagcctcccaagtagctgggactacaggtgtgtgccgccacgcccggctaattttttgtatttttagtagagatggggtctcaccatgttggccaggatggtctcgatctcttgaccttctgatctgcctgtctcggcctctcaaagtgccaggattacaggcgcgagccactgtgcctggcccccactgctttttattcctttgtgtggatccatgtttgcatctggtatcattttccttcagctttaagaactttctttaatatttcctctagtgcagacttgctgctgacaggcttggtcagcttttattcatctgaaacagttttttttcaccttcatttttgagggatgtttttgctggatataaaattctaaattgacaggtttaaaaacaaatttaaagactttaaaggtgtcctccaattccttctggctttcatagtttctgataagaagtccactgtagaggctaaggacatgaacctctgcaaagaagacatccgagtggcccacaaacacatgaaaagatgctcatcatcactaatcatcagaaagatgcagctcaaaaccacagtgcgacaccatctcacacagtcagaatgcctttgatcaaaaagtcaaaaaataacatgttggcaaggctgaggggaaaagggaatgcttacacactgttagtgaaaatgtacattaatccagccactgtggagaacagtttggagatttctctctctctctctctctctttttttttttttgagacagggtgtcacgctgtcccccaggctggaatgcagtggtgtcaacatggctcactgaaacctcaacctcctgggctcaagcaatcctcccacctcagctttccaagtagctgaaactacaggcgtgtaccaccatggttggctaattttttttgggtctcactatgttgcccaggttgatcctaaactcctgggctcaagccatcctcctgcctcagccgcccaaagtgctggaattacaggcgtaagccactgtgcccacccgagctttctgaaagaagtaagagttgaactatcattctgcccaataatcccattactaggaatatacccaaaggaaaataaatttttctacccaaaggacacacgcttcccgtatgttcatcacagtgctattcacaatagcagagacacagagtcaacccaggtgctcatcaataatggattggggccagacgcggtggctcatgcctgtagtcccagcattttgggaggcctaagcgggtggatcacctgaggtcaggaattcgagaccagcctggccaacatgacaaaacccctactaaaaatacaaaaattagccgggcatgatgacgggtgcctataattccagctactcaggaggctgaggcaagagaatcaattgaacccaggaggcagaggttgcagtgagccgagatcgcgccacttcactccagcttgggcaaaagactgaaactccatctcgaagaaaaaaaaatagtggattggataaagaaaacacggtacaaatacaccatggaatactatgtagccattaaaaagagggaaatcatgtcctttgcagcaatgtgtttgcagctggaggccattatcctaaaaaaactaatacagaaacagaaaactaaatactgcatgttttcacttacaagtgggagctaaatttgagtacgcatggacataaagatgacaaaaatagacaatggagcctactagataagggagagaaggagcggggcaagggctgaagaactacctattgggtgctcactaccgggtgataggtttagtcataccccaaacttcagcattatgcaatataccttcataacaaacacgcacatgtatccctgattctaaaataaaagttggaaaaggaacaaaaaaggggctgggcatagtggcttatacatgtaaccccagcacgttgggtggccaaagcgggaggatggcttgagcccctgagttcaataccagcctgggcaatatagtgagaactgtctctacagttaatttaaaaaattagctgggcgcagtgctgcatgcttgtagtcccagctacctgggaggctgaggtgggagggccgcctgaacctgggaggtcgaggctacagtgagctgtgattgtgccactgaatttcatcctgggtaacagagcgagaccccatttccaaaaaaaaaaagaaaaaagaaaaacagtttactgtaatgttttttgtgctttgtatataatgtgtcttttttcccctagagctgcatttaaaatctttcttctaatattagttttcagtaactggattataatgtatttagattggtggatgttgtgtgtatgttgggtgttgggtctatgtatttattgttttcaaatttagaaaaaaattttagccattattttttcaaacccattttctgttcttcgctccttcctctctttttaggtctccaattaaatgtctgttaaactagcttatactttctaaaggtcacaaaatctgttcggttttttttcccgttttttttctctatatgttttattgcagatgtatctcatttccttttttctgatgggaaatttatttcttaattttacattgatacataataattgtacgtatttatggggtgaattctatgtctatgtcttcgagctgcctgatatttttttattctgcaaggtctaattttgtttagttctagccagtaaaatttttatttcgtatattgtattttcatctctagcagtttcatttggttctttttttactttctaaaattgctcatttcgttatgtacatgttttcactaacttttctaaacatagttgtattatctgttttaaggtctttgtctactagtttcttcatagctgtcattccagggtctcttccattgaccaattttctcctgggtataggtcacatattcctgcatattcctgattttttatatatctagaatttgcagttgaatggtggacattgtgtgtgttacaatgcaggtgtctggactgagttctcatcttttttttttttttttgagacaaggtggagtgcaatggtgtgatcacagctcactgcagcctcaatctcccaggctcaagtgatcctcccgtctcagcctcccaagtagctgggatcacaggcacacgccaccaaatctggctaatgttttgatttttttgtagaaatgaggtctcattatgttgcccaggctggtctcaaatgcctgggctcaagtcatcgtcctaccttggcctcccaaagtgctgagattacaggtgtgggccaccacgcctggtcgagttgtcatcttttaaagactttgtttcaataggcagttaatttacttgaagttatcagcttgataccttcaacctctgggaagtggaatggagaacacagcaagggaaagcttttctttatatatttttgtacatgatattttttcaatgaatatgcaataatttttgtaaaagttattttaaaatctttcatgaacatgtgtggtcatacattcttgcctcggctgaatctactaagcatagattgagtatccctaatccaaaatgcttgagaccagcaagtgtttcagatttgggaatttcttcagattttagaacatttgcatacacacaatgagatatcttaggaatgagatccaagtctaaacaaaaaagaattcatttatgtttcatatacaccttctccacatagcctgaaagtaattttatacaatattttaaataatgatgtgtatgaaacaaacttttttttttttttagagacagggtcttgctctgtcatctcggatcactgcagcctccacctcctagattcaagcgattctcctgcctcagcttcctgagtagctgaaattacaggcacatgccaccatgcctggctaatttttgtgtttttagtagagacgaggtttcaccatgttggtcaggctggtctcaaactcctggtctcaggtgatccacccgcctgggcctcccaaattgctgggattacaggcgcgagccaccgcgcctggcctgaaacaaacttttgactgtgctgtgactgtaacccatcaggatggtcaggtgtgggatttccctcttgtggtgtcatgtcagtggctcaaagagttttggattttagagcatttgggattttggatttttcagattatgaagcctcaacctgtataaattaatcttcatttgatgcattgtcatcatctgctcttcagggtttcactatttgcacaataaatacttagatatgtgactggactgaaactattctaatctattcagagtgttttggaatcaaaccctttataatgtttattaatttcccacttgcctttttctaaacatacaatgtattgtttttttaaagtttatgtaaaagctttccaaaaatgttatgagaagatatgcacattccctactactgggattatttgaaattattttggaggttccaatcaatgctatagatatatataaaacatatatctatagcattgattgattaatatattatatattaatatattatatataaatatatatattaaataatatatttaatataatatatataatataatatataatataatatatattatattatatattatataatataatatacaatataatataatatataatataatataatataaaatataatatataatatattatatattataatatataatatattatataatataatatataatatattatattatatataatatatcatatgatatatattatatgtattatatatattatacaatatattatatttaatatatatattatataatatattatattttatatatattatattatatatataatataatatatataataatatatattatataatatatattatattatatatattatataaattatattatggtattatattatatatataatataatatattttatattatatattatatattatatattatatatataatatatatataatatataaaatataatatatataatatatttatatattatataaatatatatttatatactatatttatatttataataatatatttatatttataatttatatttatatttatattataaaatattataacttaatatttatatttataaatttatatttataataatatacaattatatgtataattatatattatatgtattatacattaacatatattttatatatatatttcacatatgtatgtgaaagaaattatttgtgcatgacagtgttgtctacccagaaaatctgaaaaaataaactgaaaacctattggaaccagcagtagaggtcattaaggtaaccagctaccagataaacacctccccataccaactaagaggaaacaaatttcaattttattaaaaataatatttctatataccagcagaaaccaatcagaaaatagttcctaaacggaaaaaattccattcccaacagcaaccaaaagctaaaaaatagtccaagtttaataaatgtttgagacctatatgaagaaaactgctgacattattgaaagacattctgaacatatggccaagggctgtctgttcttggataggagggttacatttatggtgcattattatgtggcaggcattttaaatgcattattccactgaattctcatcataaccccatgacatgagtattgttattacttctgctttagagataaataaattaaagattcctgagttgcgctaacttgtcagagcagaaagactgagtttctggtgcctgtctcctgtctttttaaccatggctgcatcatactgcatcatttctccctaaacagttatagatttggccaagcacggtggctcacgcctgtaatcccagcactctgggaggccagggaaggtggatcacctgaggtcaggagtttgagactagcctaaccaacatggtgaaaccccgtctctattaaaaatacaaaaattagctgggcgcggtggcaggtgcctgtaatcccagctacttgggaggctgaggcgggagaatcgcttgaacttgggaggcggaggttgcagtgagccaagattgcaccatttccctccagcctgggagacagagcaagactctgtctcaaaaacaaaacaaaacaaaagttatagattcaatgcaattcctatcaaaaccttaacaggaatttttttaacttaaaagttcagctgggagagtaaatactaaatattgtcaagatgtttttgaaaagaatgacaaggtggaaattgccctattaggtataaaaagagactaccaaagtaatggaattaaaagtgttaatagaaaaaaattagcagggcatggtggcatgggcctgtagtcccagctactcgggagtctgagatgggaggttcgcttgagcctgggaggcagagattgcagtgagctatgattatgccactgtactctagcctgggcaatagagcaagaccctgctgatttaaaaaaaaaaaagaaaagaaatgaaaagaaaaggaagagttatggttgtacgggtatttcaactttggggtaaagtaaattcagtaaatggtttggagataaatggctattcagttgtaaactgtggaatagatagccacttcaaacaaaaaataaaagtaaaatgaatcatagttccaaacgaaacaacaagagcaccaagagaaaatcaaagagactatgcccagggatagtctaagtaagacactaaactcaaaaacaatacagacacaaaatattaacatttctggcaaatgtgattaggagaaaaagtttaacatcactggtgaataggaaaatgcaaagaaaatcaagaaaccattttcctcctatcaatttaacaattgcttttttaaaaatgatactatccaagctaggtgcggtggcttacgtttataatccctgcactttgggaagcctaggcaggcagatctctggagcccaggagttcaagaccagcctgggcaacatagcgagtctcagtctctacaaaaaatacaaaaattagccagtgtagtggctcacacttggggtcccagctatttgagaggttgaggcaggaagatcactggagcccaggaggctgaggctgcagtgagacgtaattacaccattgtaccccagcacgggtggcaaagtgagaccctgtctcaagaaaaaaaaaaaaggatattatctagtgtcagtgaagacttggagaaaaatccttatcattggtggaaatattaactgatacagcatttttggaggacaaattaacatatctatcaaacgttaagactagatcctttttgacaaatgagcgcttatttagagtggtagattgaccataaaatatggatccaatactgacacagaggttaaaaagaaaaagctctctctcttactttatcccagaagaatttttaaattttgtattttgataatatattgttttataaagattcagagctaccatctttttggtgcattggatcttttatcaatgtatatattctctttagctctctctcttaaggtgctttatcataaaattatattttgtctgatattcatattgccacctatatttcttttagtttgcatttgctgttgttcatccattattttcttattctctttctttcttttctttgtttaaattgagacagagtcttactctgttgcccaagctggagtgcagtggcatgatcatggctcactgcagcctcgacccctcggctccagtgatcctcctatctcagcctcccaagtagctggtactacaggcatgttccaccatacccagctaatttttttttttttttttttttttgcatttttttgtagagacagggtttcaacattttggccaggctggtctccagctcctggactcaagccatctgcccgtctgagcttcccaaagtggtggggttataggtgcgagccattgcccccagctatttattcttcttcttctttttttttttttaagatggagtttccctgttgttgcgcaggctggagtgcaatggcgagatctcagctcactgcaacctctgcctccctggttcaagcgattctcctgcctcagtctccctagtagctgggattacaggcggatgccacagtgcccagctaatttttgtatttgtagtagagatggtgtttcaccatgttgatcaaggctgctttcaaactcctgacctcaggtgatctgcccgccttggcctcccaaaatgctgggattacaggcgagagccactgcgcctggcctgcccctagctatttcttattttcaaaaactgttttggttactgtgtatctgatgaacatcatattgttggctttaaaaataattttaatagactatttttaagagcagttttaggttcatagcaaagtttaatggaaagtacagagagttcccatacacactcctcacccccacatgcataggctctccactctcaacattccctacaatagtggtatagctgttacaatcgatgaactaacactgatgcatgaatatcaccccaagttcacagtttacattaaggcttcttcttggcattgtacattccatgggtttgggcaaatgtagaatgaaatgcaccatcattacagtattgaacaggagagtttcactgccctaaaaatcccccgtgttcatctatttattcctctctctccccaagtccctgacaatccctaatctttttactgtctccataattttgccttttccagaatgtcatagagttggaatcacagagtatatcgcgtttccagattggcttctttcacttagtaatttgcctttatgtttcttccatgccttatttatttttatttttaatttaattaatgtttgtgggtacatagtaggtgtatatatttatgggatacatgaaacattttgatacaggcatgcaatgtgaaataagcacatcacagggaatggggtatccatcccctccaacatttatccttcgagtgagttacaaacaatccaattacactctaagttattttaagatgtacaattaagttattattgactatactcaccgtattgtgctaccgaatagtagataacattcattctttctattcttttgtacccattacccttgcccacctccccaccctccatgtcttctcatgccttgataattcctttctttttagctccggataatattcctttgtctggatgtaccacagtgtatttatccatttacttacccaaagacagtttgtttgcttccaagttttggcaattatgaataaagttactatagacatccatgtacaggtttttatgtagacacgagttttcagctaatttgggaaaaactaaggagtgtgattgctgggtcatttggtaagagcatgtttagttttgtaagaaactgtcaaaatgttctacactactggtgggaatgtaaagtggtacaactgctatggagaacagtgtggagattccttaaagaactaaaagtggaactaacatttgatccagcaatccccctactggatgttaacccagaggaaaagaagtcattatacgaaaaagatacttgcccacgcatgtttatagcagcacaattcacaatggcaaaaaatgtggaaccaacccaaatgcccatcaatcaatgagtggataaagaaactgtgattgagatatatgtatatataaaacagaatactactcagccataaaaaggaatgaattaatagcatttgcagcaacctggatgagattggaaactattattcaagtgaggtaactcaggaatggaaaaccaaacattgtatattctcactcataagtgagagttaagctatgagttaagcattgagcataagaatgacacaatggactttggggactcagggcggaaagggtgcaaagaggatcagagataaaagactagaaatatggtgcagtgtatactgctcgcatgatgggtgcacccagatctcacaaatcaccactaaagaacttacttgtgtaacccaataccacctgttccccaataacctatggaaataaaaaaataaaataaaatatttgagaagagaaactgaaattcttctacttaaagaagaatagcattttaagaagttgccttgatactaaaatctgcaggtattaaaaaaaaaggaactgacaaaatgtcttccaaaggggctcttgattctgctttcctaccagcaatgaatgagagtccctgttgctgcatgtccttgccagcatttactgttggtgtgtattagtctgttctcacactgttctaaataactttccaaaactgagtaatttatgaaaaaacgaggtttaattggctcacagttccttaggctgcacagaaagcatggctggggaggcctcaggaaactttcaatgatggcagaaggcaaagaggaagcaggcaagtcctacatggctggagcaggagaaagagagcaaagcgggaggtgccacacacttttaaacaaccaaattttggccagcatggtggctcacacctgtaatcccagcactttgggaggctgaggcaggcagaccacttgaagtcaggagttctagatcagcctggccaatatggtgaaaccctgtctctactaaaaatacagaaaaattagctgggggtggtattgggcacctgtaattccagctacttgggaggctgaagcaggagaatcgcttgaacctgggaggtgaggttgcagtgagctgagattgtgccactgtactccagcctcagcgacagtgcgagactccatctcagaaacaaaacaaaacaaaacaaaaacacacaaaaacctcccccagctttcatgagaatgaactcactatcacgagaacagtgagggggtcatgatccaatcaccttccaccaggtccctcctccaacactgaggatcacaattcgacatgagatgtgggtggggacacaagtccaaaccatatcagtgttttcagtgtctgacattctgataggtatgtagtggtatctcattgttgttttaatttgcatttcccttatgacaattatgttattgctggatgtttatgttttcattcagcctaagagtatttaaaagttttttaactatggtaaatgacacatgaaatttaccatctttatcatgtttaaacatactgtttagtagcattaactatactcacattgttgtgcaactgtcgcaatccatctttagaggtttttcattttgcaaaactgaaactctgtacccattaaacaactccccattgccccctacccttagctgctgagagccgccattctactttctgtttctatgattttgcctattctaggcatcgcatgtacatggaatcatacagcattatttgtctttttgtgactggtttatttcatttaggataatgtcctcaatgttcatccatgccatacatttgtcagaatctgcttcctttttaagtttgaataatactccactgcatgtgtaaactacgttttttttttcttttgagacagagtcttgctctgttgccaaggctggagtgcagtggctcgatcttggctcactgcaagctctgcctcccgggttcaagtgattctcctacctcagcctcccgagtagctgggattacaagtgcctatcactaattttctgtatttttaagtagagaaaggtttcaccatgttggccaggctggtcttgaactcctgacctcaagttatccacctgcctcagtctcccaaagtgctgggattacaggagtgagctgccactgcgcccagccttttttttttttttttttttttttttttgagacagggtctcactctgtcgctcaggctggagtacagtggcactatcgcagctcattgcagccttgatctcccagcttaagtgatcctctcacctcagtctcccaaggactacagaggtgcaccatcaggcctggctaatttttaaatatttttgtaaattccaggtctcgctatgttgcccaggctggtctccaatgcctgggctcaagtgatcctcccaccttggcctcccaaagtgctgagattacaggcatgagtcacctcgcctgccttatattttgtttatccatttatttgcttctaccttttggctctcgtgaacaatgctacaatggacatagatatgtaaatatcccttcaagatcttgcttgcaaatctttgaggtatatacccagaagttgagttactggatctcatagtaattctgtttaatttttccagggactgccatactgttttcaatagtggcttcaccattttactttcccatcaactgtgcacaagcgttctaattacttcacattctgccaacatttgttatttttgtggagtttttggttttatttttattttttatagtagacgtcttaaggggtgtgaaatgtttccctttaacagagttgaggctgagtgtggtggctcacacctgtaaccccagcactttgggaggctgaggtgtgtggatggcttaagcccaggtgttcgagagcagcctggacaacatggcgaaaccccgtctctaccaaaaatacaaagattaactgggcgtggtggcacatgcctgtagtcccagctactcaggtgacaggcgggagggtcacctgagcttgggaggtcgaggctgcagtgagccatgattgtgcctctgcactacagtctgggtgacagagtgagaccctgtcataaataaataaataaatagtgagttgaacccattcacatttaatatagttactgatttctgatattttatgttttttattacattgttctctttattatttcttttactttcttatttcctaggattttttttttatacactgaattttctttttttaaaactctcttctggttgtttgaaaagttatacgtactatttctttttttttctttttttttttttttagagatgggatcttgctatgttgcccaggttggcctttgaactcctggcctcaagggatcctactccgtcagcctccagagtagctgagactacaggtgcaccccacggagctgggctttcttcctatttgtctattttcaggtaaaggctcatgttccttgaacacctgctatgttccagcccctatgcagacctttttatattgatgatctcatttaatccttacgacagccctatgaggttgctcctatttttaaaaataaactttatattttagaataaattaattttaaattagaattaacttagaattatttagaataaatatttttactttagagtaatgtttttaggacttagattctaaaaagaaaaaggaaagtgctgtaggcagtacagagagtttctgtttactctacacctagtacacccagtttcctttagtattcatagcttccatggatatggtatgcttgccaaaattaatgaaccaatagtgacacattttattagctaaaatctgtagtttatgcacatttcccaggtttttgtcaaaattttacaatctgtgtcaacataccacacgacatcagcctcctgtctcccttaggttcttgttggctatgacagtttctttgtttcgatgaccttggcagtttagaggagatggcctttaatttaataagaccttttaaacatctttctccataaacatttagaatgaatcagtatccataatttttccctctggaataagataagatcttaaacatctcatgctttgtaggaataatctaaaatttcagttccaattgagcaataaaattctttctacatttctctttctctttaaaatagtttcttaaatgtcttaatcttaagatctcagtataaattttatcagtttatttatatttgttaccactttttcatgttttgaatttaattatctttcttgaattactttttcccccccgaaggaaatattttcagaaaggatggttgggtgataaactttctgagcccttcatggtcaagcttttcttatttgcaacatggagatcaaaatacctatcccacagaattgctgaagatgaacgaattcatacttttaagcttttagcagagttcaccatataagcaatcaataaatgttagctcttgttactattacaatgagcacatattattttgtaattataaggaaaactatgcacggacgcacgcaaggaaggagggatagtggtaaagaaggtgataatacggaaagtgatgtgacagaatggaagagcaggtgacataaccactattttcagcttggtaaatgtggaaaagtcctgagcatttctgccaaccagcttaacctgggctatgctgtcatccatggtccagacagccacgtgggtgttagaagccacatggcccatctgtctcctctgaggtcactggagtttatcagctgttgtgtacccttagcatgagtcaggagggttctgggaaaatgtctttctagttgaaggactggcaattcagttcaaagattaataaacacaaaataacacttgagaagcatgtgtcatgtcaaatgcagaacgtgtgttccagagggaggaacaaaacacgagtgctctctaaacagaccaaaatttcttcaattgattctttgctattcatgagcaagggagggagaacaaattgttatgcctgacaccagatttcaggcctggaattttgtagtgtgattcatgcagctatatttaatatttgcagagtcatccagtaacccctgtcagagcccagggaagccttcaccctggggcaactcccttctccaccatccatgcactgcttagggatccttgtaggacggtcttggtatgacgtatcattcctcgcatgcttgaatggcagttgtgtctccataaacaccagtgccggccaaacacagccaggtctttcatgtcaatttaggaatgtgttgccctcataaagataaggcatttagtgctcttgaccttgttaaaggtctgtgactggctcagaatttttaatacccggggagtagtgcggaggcgcggtgggggatggactctagttgtttcctgtgctcagggtagaatcctggaacctgagttgccaaaaaaaaaaaaaaagaaaagaaaagaaaaaaaggaaaagaaaaattggatcattaagttaggatattatgtttaaatcttataatgtacttgtaaatgttgatggcataatatgtaagtaacaaaagacatggcttcatcaatttctactttaaaagctttcacaggaaagagataaagaataatgtggctaataaatgacatgctgataaagtattaaaaagaacagaacacttctgatggcttcacactctggaaggatgggaaataagcaaacgcaaaataaaacagctgggtagactcaaaggaaataaaaaaggggtttcccccacccctgtacattccctcaaataggagctaaaaaggaaaataaaattgcaccaaaccatgagaggggaacatttaagcattctaatattgtaaatagacattcaggctgagttttccatccaaaagctaggacaggaaataaatccttaagcataactaagagactaataaggaaatattttcaggggtttaaagcaaatagtttttttaatgcaaaaacaacataatcaagacatattatcacatgtcatatatgacagcaaatatgcttaccaggcttcttccaagagcaaatgagataaaagtactttgaaaccataaaacgttatgcaaatgtgcagtgatattagcgttatttgggaaaataaaagcactgggcttctcccttttcctgtttctcattccttttatttaccttaaaatacaagtttatttcttctcaatatacctgaggagttgcctagtaggaaatggaacacacacaaaatccggctttttcttcctgtcttattgttcgtttgtcacaatatttgtttttcctggttgttgtttaaaaattgttatggaaaatttcaaacagacatcaagttagagagaatttgatcatgaacgtcatgtcctcatccctcagactctacatgtgttattagctttttggccagtcttattccatctataatcccacctactttccaactcagattattttgaagtaaatgccagacatcctgtcatttccattagaattcctaaaagataaaaactattcaaaaaagaacacgggacagaggcaggcggatcacctgaggacaggagttggagaccagtctggtccaacatggtgaaaccccgtctctagtaaaaatacaaaaattagctgggtgtggtggtaggcacctataatcccagctacttgggaggctgaggcaggagaatcgcttgaacctgggaggtggaggttgcagtgagccaagattgctccattgtactccagcctgggcaacaagagcgaaactccatctcaaaaaaaaaaaaaaaaagaatacaggctggacgtggcggctcacacccataatctcagccctttgggagaccctggaggaaggatcacctgagcccaggagtttgagaccagcctgggcaacacagagagacccagtctctacaaaaaatacaaaaattagcctggcattgtggctgcgcctgtagtcccagctactggagagactgaggctggaggatggcttgagcccaggagattgaggctgcagtgagccgtgattgcaacactgctctccagtctgagtgacaaaggaagactctgtcaaaaaaaaaaaaagaaagaaagaaagaaaggaccttactataacaattattcttgaatatcaccaaaatccagtcagtgctccatttccccgattgtcctgtaattttttaaacaagttgttcgaatcaggatccaaaaaagttcccattcattgtgattgattgaggtgtctctttagattttttaagcctggaggtactggcacaacctccttctctctctctccctcctcctcccactctttctctcccaccccctccaccctcaaacccagcaggtctgaccaggcagcagtggtcatctgattgacgcgcattgaactctctgcctgaaaagatgctgtacttcgttgagttccttccttttctgttctgcccaagctgtaatggctctgaggatttggaaaaggttttagaatctaggaatgaatgagaaaactgttttaaagggcccctccacactactgaggtcatttactttttcttactctttaccaaaacctgtatagatcactgatataatagatgcgaaagatactctagtggaaaatgtcatgtaaatgtaaaggactgctgatggttatgttatcattcaagaatgttttacagggggagatcttagcaagcggaagtacaagtaaaactgaatcatgagcaatttatgttattaccttcagggcaaccataaattaagccagataattgttcccgggctctgaacactatgggacaagaagccatggctataagccaagaaaaaaaaagccgtatttttaaaaatacccatttaaaagaggaaaagcaattagggagcagatcctgtaagtaaaggaagacggggaaatagcattaagtaggtatccaacaagttatttgatatgacagtggtacaaatgatgcaaaaatattctctttcttccctcaaatttacagaaactggctcacagttttttgagtagtgaagaattttagggctgggcgcagtggctcatgcctgtaatcccaacacgttgggaggctgagatgggaggatcacttgagcccaggagatcagcctaggcaacatagtgaggccccatctctacaaaacattttgaaattagctgggcgtggtggtgcacgcctgtagtcctagtgtattagtctgttctcacactgctataaagggctgtctgagactgggtaatttataaaggaaagaggtttaattgactcatggttccacatggctggggaggcctcaggaaacttacaattgtggtggaaggggaagcaaacatgtgcttctccacatgatgacaggaaggagaagtgcagagcaaaaggggggaaagcgccttatgaaaccatcagatctcgcgagaactcactcactaccatgagaacagcagcatggggataaccgcccccatgattcaattacctctcaccaggtccctcctgtgacacgtggagattttgggaactacaaatcaagataagatgtaggtggggacacagccaaaccatatcacccagctacttgggaggctgaggtggggggatccgcttgagctggggaggtcaaggctgcgttgggtcatgatcgcaccactatacttcagcctaggcatcagagtgagaccctgtgtcaaataaataaataaataaacaaataaaataaaaaattcaggccaggcatggtggctcacgcctgtaatcccagcactttgggaggccgaggcgggcggatcatgaggttaggagatcgagaccatcctggctaacatggtgaaaccccatctctactcaaaatacaaaaaaattagccaggtgtggtggcgggtgcctgtagtcctagctactccgggggcaacccaggaggcggagcttgcagtgagctgagattgtgccactgcactccagcctgggcaacagtgcgagactccgtctaaaaaaaaaattaaaaaaagaattttagagacaactcaatctgccattcccgcatccccatctttttctttatttctttatttctttttcttttctttttttttttattttgagacattgtctcactctgttgcctaggctggagtgcagtggcgcaatctcagctcactgcaacctccgcctcccaggttcaagtgattcttctgccgcagcctccagagtagctaggattacaggcgcacgccaccgcacccagctaatttttgtatttttagtagagacagggtttccccattatggctgggctggtctcgaactcctggcctcaggtgatccactctcctcggcctcccaaagtgctgagattacaggcgtgagccaccatgcccagcctccccatctttttcacagatgagaaaatggagacctagatgggctatgaggtatgcccaaagttgaagagccatttaactgtgttgtgggttgtaagccataggtctcctgatactgaatccaaagctctttctctctctttcctccttttttctatcatgctttgagagaatttacaaagtgttggccataattttacggaaataacgctagcaataaaggtaatttgctatcagcaatagtcttgaatctggagtttcaattaaatttattaaatgtgttgggtacctaccaccaggttataagaatactttgaagtttcttttgcttttaacattacactttttctcaggttttttatttgtttgtttgtttgtttgtttgagacggagtctcgctctgtcgcccaggctggagtgcagtgatgcgatctccgctcactgcaacctctgcctcccagattcaagtgattatcctgcctcagcctcccgagtaagtgggattacaggtgcccgccaccacacccagctaatttttgtatttttagtagagacggggtttcaccgtgttggccaagcttgtcttgaattcctgacctcaagtgatccatccgcctcggcctcccaaagtgctggcgtgagccaccgcgcctggccactcaggttattttaatgccacagtttactgtcacatataggaggtagagattcctttcatcaaacttaccactcgtgttggcaccatttatggtccattatttgcttttctcctcgccatcctccaacccatctcttcgtctcccattcacagccaaggattgacttattttgtacaaaagtggccgtgcctgctggtaggaaggtcaagagggacgtccaccagtggtgcatgtggccgtctgcctttaaacttaaactttcgtttctgcttgcttcaaaattatagtttgaaaggtcgctttcattggtagctagatctagctgcctcttttcacaggtaagaccacaggaacccagaaaggcagagggcttgctcaaggtaactcgaggtatcagtggtagatccaggcacagagcccaggtctctgcagtgctctatcgttggatcttatacacaagagaatcaaatctactcagctgcctagggatttgtgcagaaacaacttccatttgtggttgagataactgatgcgagaattttcagtaacaggatttcttgggtagaagtgggaaaaaatccccactgggaacaaacttaaaatgaaaagatgtgaaaatgtatgcctctctgagaaaagatgtttcagctgcttcctggagtgacttgggttagagaatgagtttgtaagtgcgtgctgacccagttaatgtaggaagtatcaaactccaggcacaagtgacctgaaagagaaggagtcctctttttaataaacgtaaacaaatgctatcttcatttttccatttaatttttttttttttgagacagggtctcgctctcttgcccaggctggagtgcagtagcacgattgtggctcactgcagcctcgacctgttgggctcaagcagtcctctcacctcagcttttgagtagctgagactaaaggtgcacaacaccatgcccagctaatttttgtattgttttgtagagatagagtctcactatattgcccaagttggtcttgaactcctgggctccagcaatctgctcaccctggcctcccaaaatgccagataacaggcaggagccatcacacctggcctaattttatttattaaagtaatatatggctgggtgtagtggctcatgcctataatccccacactttgggaggccaagacaggaggatcgcttgagcccaggagctcaagctcagtcctggcaacatagcggtatcccatctccataaaaaataaaaattcaaacattggccaagtatggtgacatgcagctgtggtcccagctacttgggaggctgaggcaggaggattgcttgagcccagaagacagagaatgcaatgagtagagattgcgccactgcactctagtctgggtgacagagtgagatctcaaaaataaataaataaataaataaaataaaacaaacaaacaaaaagaaagtaacatatgcatataggaacagttccactaggaaccagaatctaatcatgaagaaacatcttagcatgtgagccattctgagacaactagactgctgtcttcaaaaaagtcagtgtcatgagaagcaaaaaggcctgatgggacagggactattccatattttaaaagtccaaaaagacaaaacaaccaaatgcaaagtgtgaaacttaattagatcctggatgaaaaaagatatataaaagatattttggggactactgaggaaattcgattgtggattggatatccaatgatcatgggagattattgtgaatttccttagatgtgaagatgatattctgggcatggaggaaaatgtccttgttctcaagagacagcatctggaatatttccgaatgaagcattgtgatgttttttaactcacttcaaatggtccagaaaaaaaggaggagagataaagcttatgtggaatccaggttaaaggtatattggtatttcttgtactatttaactgttacatagatgtgaaaaatttcaagctaataggaaaaaaaagtctaatgcaaaaagactctttacaaaaaatatggtctccaccctatccttttctgttccctgggatatctgcttttatattttatttttattttatttttgagacagagtctcattctgttgcccaggctggagtgcagtagtgcaatctcagctcactgcaatctctgcctcctgggttcacacaattctcctgtctcggcctcctgagtaactgggattacaagcacacaccaccacgcttggctaatttttgtattttttaatagagatggggtttctccatgttggccaggctggtcttgaactcctgacctcaggtgatctgcctgccttgcctcccaaagtgctgggattacaggtatgagccactgtgcctcgcctacttgtaatgtatctagttgcttgttctagtatttaactccaaattaaaaaataaatacagatactgctatttcttgagtctataactttagatagttctaataattttctctgatagtaggtgatgtttttaactctttttacaccccatgtcttttcaccacatggtctcagaattattctatcaaattttgtgttgagatccatattcaatattttcattattattactaaatgatacaggatcatgtactgattaacaaaaaagcatataatgattacagttcctttattatgacacctgctatttttttactgaatttaatcattgctttgtttcttcagttgctttgcttttataatccattgttaagtatttcctcacctgaagaaaacagcttggttaaacttcacccaaggccattttttcccctaaaatctcttccagttcctttttttttttttcctgagaacacctggtgtggagctctctaaccacctgctgtggtctggagtgcatgctcaccaggtttgctccataattcctaactgggactttcctccacccctgccctgggaattcccattgcattgctcctatgttggatcccctctggctcttgggttccatgcttccttgcttccctatcttacggctatcagcgttgtgttgagaagttgaattccatttcaattcctgactctttgcatgtcacctactttttctctctaaaaattcttgggatattttcttctatctgatgtcctgaaattacaccatgatgttctttgatgttggtgttttccattcagtgaactggacattgcttggaatttttcatttagagggacatgttcttcaactctgggaaaatttatgaaattattcaataattttcttctttccatcttctctggtctatctttccaggactcttgtcagtcagatatcgagtttctatattgaacttctgagtgtgttactttttttctcactatgatcatcttccttttgctctacattcagatagatatattaaatgtaatccttcagtccttttactatttttaaatttctgctatcatgtgtatttatttgtatttatagtcaccatattttcagttttcaagagttccttctttttttctaatccattctattttaagcattctattttcattttatgaatataatatttctctggtttttcttttttttgttttttattgaagtttaatctctatataataaaatacacaaactttaggggtaaaacataatgaatttatatataaacatatattagatctattacatattattatgtttatatatttgttaaatattttatatatcatatatttatatagtttacatatttatttgtaatgaattttaaattttatatcactaaacattattttattatatataataagttatatattacaagaaactaaatcatatatgatgtgacatatttgtatatatgatttatattcttatgtatgatttatgtttatattatttataagttatatgtatttataatataacatacgtaatttaaatacacctgcataaccaccagtcagatcaaaatagaaaacttttccagcatatcagtagactgccttgtgctgccttcctgatcaattcccttcacaaaataaccaccattgccacttctattgtattattcaatttttcctattagcttttatattagatattcttacatattttttcagtaagagagatcacagtgtgacctaataacttatatagtctactttgaattggtccttttaccacttacaaacaatgcaagaatctaacaacggcttaactctttcactccttccttagctttgtgatactgttgtcacgtattatactcctgcatgtgttacagaacacataggacagtgttattattgctaatttatatggaaatagtcctttatattttcccacattactctttttggtgctgtctggtgcttcttttagtaacatatttctttcagtgatcattttacttcaatttccagaagttcctgtggtatttcattgagtacacattggatggcaacaaattctcccagtttttgtttgtctgaaaatgatttaattttgccttcatttttgaaggatattttcactaggtatggaattctatgttgtcagtttcgttttcttttagcactctaaagatgctcttccatgattttatggcttccatagttttgttgaaaaatcagctgtcagtctaattgtagcttcttacagatgtgtttttttactctaacagcttttaagattttctgtctgtcttcagttttcagtagtctggatataacattggtgatttttttttaattttgcctagattttgcaaaacctcttgaatctgtagtttaacattcttccttctcagacatcatctcttcaaatattgcttctgccccgttttctttctcctttccatacaggactccaattttacatttgtgagaccttttgctgtgactcataagtctcttatagcaagttttcttacttttttctgagtgtcagtttgaataattttctattaacctttcctcacatttgccatttctgtctttagctatgtctagtcttctgttaaattcttcccataaattcctaattttcatcattgtatttttcagtctatgtttcttttatagatttagatctataggttgaagtttttatttaaattctccattttttcatccattttgtccaccttttcctccacttacttttacacagtatttagttattttaaagttctagtctgcttattccaatatctggattgtctgttggtctgcttctattgtctgtttatatttttatttattattggctatatggtcttgtctcattgaaaagttaactgttttttaattatatattaggcattgtacataaaagaagtgtagagcctccagatgatattattttccaacagagagggcttcattttttcctatgtgaagtacacagggtgaagcactaatcacttcaatctagttagaaattaaagtggatcagggctaggctgcagtttttgtttgtttgtttgtttgtgttttttgagacagagtctcactctgttgcccagggtggagtgcagtggcacaatcttgactcactgcaagctccacctcccaggtttgtgccattcacgtgcctcagcctcctgagtagctgggactacaggtgcctgccaccacgcccagctaattttttgtatttttagtagagccttggcctcccagagtgctgggattgcaggcgtgagccagcatgcccggtcctaggctgcagttttaagaagattcaattcacctctgattcatctctgtatcttgggtaatcttcagcctgacttataggatttcattggtctctctcaaatgaaagcattaaattaaatttttgttttgtgtgttggggacttggagttggcactcaatcaatgtcctttcttccataccaaattatatagtttgaagagaaattatggaggccaaaatattatacttattagtgttagaagccctgttggagaacaaggctttaagcttgctgaacaagttagcttgtctgtattaaatctcaaattaggcaaactttcttacctagaaccagataatgctagatgggatcaagtctccttataccggagtactgtgtaggcatgagggcacagcagagaatgtttggttctacaagcaacttcctcccaagaagaagtagagcagagttgagttgagcatgctcagttatcttaaatttatcaatcaaattaatgattccacctcccttgtattatggggaaatttttcactgtagaaaataggagtgggaaaaggtattcctcctctaacatgcactggactgtgttcttgatagggccacaacgctgaggcagaatcaccaacctcatttgagtaaatagtccccttcatgcattcattccctagttaagaattaaagaatgcctaaaaattagtcatccaaaggttttcttattgccagttctccccacattctcttacaccaagggctgataaactgtgacccataagccacatctagcctgctccctctttctgtaaataaagttgtatttggaatgcagtcacatctgcttgtttacatactgtttatgactgtttttcacacttcaatggcagagttgagtacttatgacagggattgtatggccctcaaagcctaaaatatttactgtctagtactttacagatgaagtttatcaacccttatattagaccatggctggttttgtaccaacctttttctctctctttctgaggcttatttaaagaaagaaggaataactggataaaaggccagataccctcctctctatctctaacacacctaacatttgaggatctctgaatatttctcatagttgtttctttctgccttttaaacaataaaggttccagtcagaaaaaccaaggcatggtatggatccgggagttagaaggaaacaaggcttccatgattgatatcagctctggtttcctgcaaaggacaaagtcaagcaaggttacctatcagttctccatagcaggtagtggccaacgggtctcagacaatgcaaccttgagttcattgtttctcaggcttggcagtctcactttggacaagcgggataagtgcttatacacactttaagaatatctctagccaggtgcggtggctcacgcctgtaattccagcactttgggaggccaaggagggcggatcacgaggtcaggagatcaagaccatcctggctaacacggtgaaactccatctctactaaaaatacaaaaaaaaattagccaggcgtggtggcgggcgcctgtagtcccagcaactcaggaggctgaggcaggagaatggcatggacccgggaggtggagcttgtggtgagccaagatcgcaccactgcactccagcctgggcaacagagcaagactccgtctccccaaaaaaagaaaaaaaaattggttgattgaagtgttcttttaattctagggcagttttctttagttatatctttaaataacttttcctatactctcctcctcttatttctagtgagatgaaggctatgtgtattgaatcttctttgtcttccatatttaaaacatattctctctaatcttttaaaatatttattctcatttatttatttttgcttttctcctccagatcctccatatgctttattacgtttttcagtgtttattctcctttgtgttacttcctatttgacctttatttctaggattattttctcagtttctctcctgggctttcatttctttggttgcctgggcatctttcctgagcacttgatctctatgtgtgcttttttactgtggagaaaatagttttgttgggcttttgtaattcagttttatctatttggaatcaattttcatctactatatcacaatttccatctgttccatgacaatatttttctatttaatgtccattatttgtcatttttctatcatttatttctgccaatataattatatagattattttaattcatttttacaattatgagttttgcttaaataaactaaatatactagggataagctcatttcaggaagttcagatggaggagaggtgaggattatgttcctcacctattagacaatatgtgatgtgccctagtgagctttttcagcctgtatttctcccagttatcaaagctcagccctgcattgttgttcataatacagagttgctctgtccaccactcctctacaagatgtctcctataaatatgacttttctgtgtgaggctttatttggtaacatattccttgttcatcaagaatctatgcttacactgggcatggtggctcacgcctgtaatcccagcacttttggaggccaagacgggcagattgcttaagcccaggagttcgagactagccttggcaacatggtgaaactctctacaaaaaatgcaaaaaaggccaggtgtggtggctcacacctgtagtcccagcactttgggaggcagaggtaggtagatcacctgaggtcgggagtttgagatcagcctgaccaacatggagaaatcccgtctctactaaaaatataaaattagctgggtgtggtggcacatgcctgtaatcccagctactcgggaggctgaggcaggagaatcgcttgaacccaggaggcggaggttgcggtgagctgagatcgcgccattgcactccagcctgggcaacaagagggaaactcggcaaaaaaaaaaaaaaaaaaagtaatagtaatgcaaaaaatagccaggtatggtggcacatgcctgtagtcccagctacttgggaggctgaggcaggaggatcacttgagcctgggaggtggaggctgcagtgaacagtgattgtgccactgcactccagcctgggtgacagagcgagaccttgtctcaaaaaaaaaaccaaaaaacaaaaaaccatgtccatttaaactacttaaatcccaaaaaggtgatgctgaaaagctaatagagaaaatacacatgatgaaatttatacatgtgcttgatttacccaagagaaaccactgaagaaaaaagagacaaagtacagattgcattgcacaggtagaaaacaaacgccaagacagaggtgtaaactcagttatatcagacatgtaattaacccttctcctttaggaaaaaaaaaagtgcatcttgctgccagtgttcatattttacataaacactctctttgaggctgaagcaaatctgactgattttttttctttttgagacagagtctcgctctgttgcccaggctggagtgtagtgttgcgatctcagttcacggaaaccttgacctctcgggctcaagcgattctcctgcctcaatctcctgctgattgattttcaatgtggaaataaaatagaaaaactgttcttggagttacttctaaacataactaacagaatcatcagaatcgtctatttcggaaaaataggattcatcaaatgaatctttggctaacaactgttcgagaatgatgttaacatcgtaaataggaatgctacgttttctagcatttgactttttcagtgatcgagaattacgatattttgtaatggaaataccactactaaaaacaaaatgaatgctataaatagaatgatgtcttttgtttccaaagtagataaactagagcgatgcaaaaataataataagagcaagatatttcatggcaaagttatcttaggataaacactgcagccgtaagcaccggagacgagtattcttggggcaaatggagagggttaacttaacatgcaccacatcccgcaattaaaaggcaaagattgtcaggttcaataagaaaagctccaactatatacaatttcacagagacacacgttaaatataaaggtaggggaaaggtgaaagtaacaagatgggaaatgacacaccatgtaaacactaagtaaggttggtccgacaaattaatcttaaaaactagattgaaaggcaagaagtactactagtgaaaaacgggcattttataacaataaaagggggaattcagcaggaagacataacaattataaatgtatctatatctaataatgaatcttcaaaatataaaaagcaaaatttggcagaaattaaaagagaaacaagcaaatccacaatcgcaattgaagtaaatccacaatttctctctcaactgatagagcaagcaaacaaaaatcagtaaggacacagaaaattttaatagcactattagccaaattgccctaattgacattttaaaaactttctgcctaaccactaaaaaatacacactgttttcaagtgcgcatgaaacattcaccaaaatagagtatacactgagccataaactgagtcttaacacattttgaagtgttgaaatcatacagaaaatattctctaaaaacgatagagttaaagttgaaatcagtaacaaaaattaatatcttaatttgaatatttgaatattattcagcatattcctaaataacccatatcaaagaaaaaagcacagttagaaatattttgaattaccagcctggccaagatggtgaaactccgtctctactaaaaatacaaaacttggcagggcgtggtggcacgtgcctgtaatcccagctacttgggaggctgaggcaggagaatcacttgaacccgggaggtggaggttgcagtgagccgagatcgcgccactgcactctagcctgggcaacagagcgagactctgtctcacaaaaaagaaagaaagaaatattttaaattgaaataataatttaaaaatagtttaaatacaacatatcaaaatgtgtaggacagagccagaacagtgcttagatggaatttactgccttaatgaataaactggaagaaaagttcaaagctatatatatttccatctgaaaatgctagaaaaatgagaccaaatttaacccaaagagaaagaacctttatacaaactccttcctcctccccactctctatcaggcattccagatctatcacaagctgggagggtaagtgacaaaaacttcaggccgttgatctgggattcccccagatggggttcaggggcctcttccttcttactccagaatttatcacgttatagtttctttgacccatttggtcttccctactggtcttggacgttttcaggactggggtccaatctcaaccatctttgcatccccagcaccgatcagagtaactgacacagtgcagacactcaacgagtgcatgtggtataaatgaatagctatgcacttcactgcaggtaacctgtgactcaactgtagaaagattttacaggttatggggtttgagagaatggtgactgcatccacgaaggcaccgtctaagacagccggttttgggaaaaggtgatctctggtgtgacaagttgagacctctgggctttttgttccatttgttttggttctcactgtcttgacctccttcttggaaaaccctttaacatgcaaaattgcgagtggcacatgatacttgcttttctctctccaaggcaaataatgtcagtccctttggtgatccagggatcagaaactagactacgctctgataaggacatcacccgtatgatggaaggattaactcctggccattctattttaattttactggcttaaaaatactgcaaaaatggtgaagctgttgttccttctatacttatgtccctttaaaggggatgtgtctttctcttgctgttggagctggtaactattagggacctctgattaatagcccagacaagccaggtgtggtggggcacgcctgtaatcccagcactttgggagatagaagcagatggatcatttgaagcctggaattcaagaccagcctggccaatgcggtgaaaccccatctctacaaaaaatacaaaatttaactggatgtggtgatgagcacctgtggtcccagctacttggcagggtgagatgggaggatagattgagcccaggaggttaaggctgcagtaagccatgatcgtgccactgcattccagccgggggggacaaagctaaatcctgtctcaaataataataataattttaaaaagcccaaagtgaaacatacagcaaatgtcctttgtaatacggagtagaaatcaagccataggaagcagctgagagaaggtttaatgagatggaaggatgcgagagtgcttttcaagtacttaggcaagtaaagaagaaaacaaatatttattgagtgcccactgggctcctggtactctgaggctatttgctacacatattaatttctgaaatgagaagtaggaagaagcctattttgtgatattctaaaaattaaggtctcaggtcattaggtaaaaattacagggacacggggtctattttttctcctgattaccagtagttgattatacaaaatttgaaaaacaagcacaaagaagacaaattatcacctgtgattgtaccctccagagataaatgttacaaaaattttttattatatacattgtttattataaagttgaagtcatgcaaagtatactaactgctgtaatcatttttctcatgttgtgaaatattcttcattttgtgttctatttccacaagtcgatgagctatattttaaaattgaggctccaccgctggacacttaggttgtttccaaggtttcacttagtgatgttatcaacaggagtcatacgagggtgggggctggtctggggaaacatactggatgagcaagtgagagaagaaaacgtgtttagcctgggaaagtcacagcttgcttcaaatgtttgaaggttgtcatttgaaagaacagtgagacttggtctatgtggtctcaaatgggaagatttagaaactgggtggaaagcctgggaagaagatccattcacagaatgcaaaggcaaatttcctgtagttgagggtgaccaaagaaggtctgggcagctttaggaggtagtgagttaccggttggtgaagacattcaaatataggcaaagaaaaataataacttacaggaatataatgggttaaatgtgtttacagcagaatgacctgagtgttttgagaacacggaagatgttatttatttatttgagatagagtcttgctctgtcgcccagactggagtgcagtggtgtgatctcggctcactgcaacctctgcctcccaggttcaagcgattctcctgcctcagcctcctgagtcgctggaattacaggtgcccaccaccacgcctggctaattcttgtatttttagtagagacgaggtttcaccatgttggccaggctggtctcgaattcctgggctcaagtgatccacccgcctcggcctcccaaagtgctgggattactggcatgagccactgcgcctggcctttcatttatttttgaaaggggaaagggtcttgggaaaggcttcaaaagttaaaatttgaatcgaatcaaatcctcttattctttacatcggggcccaatatttacacaatgatttatagttcacaaaggattaaagacttcccttaaaggatgaggaaacaaattcagagagggtaagtacactaccccagttcctgcggcaaggaggtagttgagaatcccccatgttctctgtcccaacagagaactcttgtttccagttgctattattattattatcaagctcaccaatcccttctaaaacatccagacttgcaagacattgtctgtgccctgcttcattacaataaaatgaaaatgtctccaatgactaatgtgaacaaaatgtcagtgttgtcaggtaagttttcctgcatggaaattccattccctttctttcccacagcagccactggatgattagagtttatgataggtaacgattgggctcccctcaactccagcatctatgtgtgagtctatgatgtctctgcttgccttctgctcagggcgggcctccttccctggtggtctgagacccgtgaatgaaggtacttcccacattagccctatgtctcacagatgccttccattctgtcaactcaggaccctggaaagctgggcttccatcctccactctacctgtgcagctgcaaagttcgtagtccacgaatgtgttcctgtttccagcatctaccctgaaccctgggctccaccccagttcttctgggctagacaagctagaaggaaatgtggaggtccccttttggctacaggagtgggctgtcaccaccctcaggaaaccagctcccttctgcccctgctgaggtgtcccttcccacccagcctttctagcaaaagcaaatcagaaggtctctgtgccatgacctaccccatccaaaaggcaccctcatccagcactccactaacgccacctcagccatctgtggggctgacagccctcccaccgaacagccctccctatcttcaggaagccagcgtccaagctgggagcgagaggaaggccggatgcagatggtccctctttcaactccagagtgaagtgtagttctcttgcttttaaccatttcctggatttaattgcttgcctactccatcctgcccgtgctgttttgcaattctctggtgactctgttcttgcaaaaacattcatttggtgatcagtagataccaggcactgggcgaagcactgagaataaaaattcccagggagctaggtttgtacccctggagggttcccttttctcctagtgcatggaagaagaaacctaccgtgaaaatacagtgataagtgacttgacaagggaatgaggctttcctggagacagcagaggagatgagaaagaatgggttgtgttctgggagtgtaaagtggtggaccctgagcagagaaggcctgagaggtcagatcatgaagggatttggcaccaaactaacatgtaagaatgttatccccaaaacaaaagcttaaagtcctctaagcttttcagtgggcaatgatgtgatacccaactgtagagtcccatgaagccttgaggaaccgggtgaaggacaaaggagtccgggaggctggtgggaggcttggactgtttatttgactcttttctgttctgtttggatgtttcaaccatgtacttgattattttttatcttgaaaacaaacaggccaggcacagtggctcatgcctgtaatcccaacactttgggaagccgaggcaggtggatcacctgaggtcagaagttcaagaccagtctggccaacatggtgaaacctcatctctaacaataatacaaaaattagctgggggtagtggcgcatgcctgtaatcccagctactcgggaggctgaggtagaagaactgctggaacctgggaggcggaggttgcagtgagctgagatcatgccactgctccagcctgggagacagagcaagactccatctcaataaataaataaataaataagaaaacaaatggtcatggctaggtgtggtgcttcatgcctgtaatctcaacactttgggaggctgaggtgggaggatagcttgagcctaggagtttgagaccagcctgggcaacatggggagacccccatctctacaaaaaaaaataaaaaaattagctggacatggtgaggcatacctgtagtcctaggtactcacgagactgaggtgaaaggattgcttgagcctaggatgtcgaggctgcagtgaggcatgcttgtgctactgtactctggcctgggtgacagagtaagatcctgtctcaaaaaaaaaaaaaaaaaaaaaaaccaaaaaccaaccaaccaaacaaaaaactccaatcctaaccaaaccaaactaaatcaaacagtatttataatattccagatatggtgcttgtgacacaaagatgaaaatacaggatgcttgccctaaaagcacttctagtttagaaacagacatggaaatacaatataacaaaatagtactaatgctataacaactataaacatattttgcattgaattgaagcaaaaataggaaaaatgttgaaaatgatagcagtaagtgtgcagatcaataaatactgtagaaatattaaaagatgttcactacatacttagattaaaaagccaggaaaataagccaaaactctcaggaactattgagctaatgagccaatgcagaaagttatctttgtagaactctgtgcctcctgcctaattttaaattccattacttaattgtttttcacagtttcattagggcattttcctcaacctgttaattttgaggaagctaatatatacgtatgaatcaatatacaaaagtggatttcttttcaagtcttgccaaaatgttgcaaaatacgattttcttttttttttgagacggagcctcactctgttgcccaggctggagtgcagtggcgccatgctggttcattgcaacttctgccttctaggttcaagcgattctcttgcctcagcctccggagtagctgggactacaggcacctgccatgacacctggctaatttttgtatttttagcagagacagggtttcaccatgttggccaggctggtctcgaactcctgacctcaatccggctgcctcggcctccgaaagtgctgggattacaggcgtgaaccaccaggcccggccgcaaaatatgatttcaagatattctgaaactgtggaatacacactttaataattacatatttactatttaagctttatcttaatgtcacaagaaaagaaaatgttaatggcaattcataaaataatattggtaaacatgcttacatgataaggaaggcaatgaatattgtcctctctctctctctctctcttttttaatggcaccatgagaaccacatcttgacataaacaactttgtaaccttaagattctgggagagagtccttggttgcaggtgtctggttaagaggaggaaggaggccaggagccgtggctcatgcctgtaatcccagcactttgggaggccatggcgggtggattacctgaggtcaggagtttgagaccagctttgccaacatggtgaaaccccatctttactaaaaatacaaaactagccaggcgtagtggtgcatgcctgtaaccccagctacttgggaggctgaggcaggaaaatcatttgaacccgggaggtggaggttgcagtgagtctagatcgcaccattgcagtccaccctaggcaaaaagagcaaaactctgtctcaaaaaaaaaaaagggggggggaaggacagtgagagcaagaaaggcgtcgggctagccctacttgggagatggctaggagaatgaagatggccacagacacattgactggggtgacattcatgtatcaatctaacagcatcccatggccttccatttttctttttttttcttcctgtttctttttacagtaaaatctcaaaaaagaaatcaattaaaaaaaaaaaggctgggcgtgatggcacacgcctgtaatcccagcactttgggaggctgaggcaggcagatcatgaggtcaagagatcgagaccatcctggccaacatgggtgaaaccccgtttctactaaaaatacaaaaattagccgggcatgatggcgggcgcctgtagtcccagctactcgggaggctgaggcaggagaatctcttgaacctgggaggcggaggttccagtgagctgagatcacaccactgcactccagcctgggccacagagggagactctgtctaaaacaacaacaacaaaaccaaaacaaaccacaaacaaaaaaccaaaaaccccaaatacttctctgctttcccaaataggcatcagatagatatacacaggcagggcacaaatacacaacaaacatatttttaaaaagtcacaaaatgtccaaataaatgcaaataaaaataagagggtgtggcagggtgtaggaaaaagccattgtcacacattacttttagggagtgcatattggtggaatcacttctgaggaatattttggtaacatgaatcaaaagctttttaaggacgcatacttttatctgaaggagataattggacaggtgtgtaaaatggatgtaggacatgtttatacaactttatctgtagtaacaacaacaacaaaaaggaaaaacttccttaaaaaatagaggagcaggtaaacaaattatggcctattcaactgatggaatactagtagctgttaaaatgattatctaaatttcagttgattaacactaaaatgtgctcatagtataattgtaagtaaaaacggcatgaaacatatctgcagtgttgtatgtgggtgaatgtactcatgtctccctaagaaaatctggaaggacatatgctaatatgaaaataccaataaggttttttttttttttttcctgggtgatatctacgagtaatcattccctcttcattgttttccatattgtaaaatcgtctgtaatgaccatgcatgactgttacattttgtttttggaccttaggtacaaagaattaagaattaactcctcggccaggcgtggtggctcacacctgttaccccagcactttgggaggctgaggaggcaggatggcttgagtctaggaatttgaaaccagcctggttgacacagaaaaacctcatctctacaaaaaatacaaaaagttacccaggcgtggtggcatgcgcttgtagtctcggctacccaggagactgaggtggggaggattgcttgagcctgggaggtggaagctgctgtgaactgtaatcttgccactgcactccagcctgggcaacggagtgagaccctatctcaaaaaaaaaaaaaaggaaaaaaaaaagaattaacttcttatttcatagcatactaccattgtcagtttatagaaggcctttttcttgttttaattaattttgtttctttgtaatctgttttagataacgaattaccttaaaaataagaataaacaaggccgggtgcagtggctctcacctgtaatcccagcactttgggaggtcgaggtgggcagatcaattgaggccaggggttcgaggtcagcctggccaatgtggtgaaaccttttctctactaaaaatacaaaaatttgccaggtgtggtggcgggcacctgtaatcccagatactcaggaggttgaggcaggagaatcgcttgaactggggaggtggaggttgcagtgagccgagatcacacccctgcactccagcctgggtgacagagcgagactctgtctcaaaaaaaaaaaaaaagaaagaacgaacgaacaataaagtttgtacaagggcagcaagtgaagacttttacccagaagtctgtaagaacagtaggggtgtcagatgccacgccatgccactgtctagggaccaaatgcaaattgttcaccttctcgcttggcgtgaggagcattgataggaatactggtttgcttgtttgtccttggaatatttatttgggttataactctcagcgagattccaactactggactttcaggcttagaatagtgcctcaccaggagtggtcactaacggatatgaagccaaccaaaagaaaccaccatcttggcacgcatctgtgtgttagtttcccttagtgccactacaaagtacaaacaactaggtggcttaaacaacagaaatgtactgtcttgaatttctggaggccagaagtccaaaatcaagatgttggcagggttggttccctctgatggccgtaagacaaaatctgttccatgcttctttgtcagcttctggtagcctcaggtgtgccttggtttgtagatggccaccttctcctggtgtctgtacgttcttccctgtgttcgtttgtcttggtccaaatttctcctttttataagggcagcagtcattttggattagggttcaatctagagacccaactcgattacctctgtgaagactctaactccatataatcttgaatcatcttggtgtggtagaaagaacatgggctttgcaattatacctgtgtttgaatcctggcttcaccacttactggtgagtggtgactgccttgagaaagtcatgtaatcactcaggacttgttttctcatccacataatggggatgtaatgttgctgtgaggattagagatactctagaacatgctgggtaagtggaggctgttactacctatgagctgagggcctttgcttttcaaggtgaacagtctatgaataaacacatctgtaagtgaatctaatgggaagattcttagatgacaaggatttcatctgtgaaccaggtcagctggcatctataccagagtccttccggcctacatgtggtcacttgtttggagccagctgtaattcacaggttacgtttttaggtgaagcctgtataaaaccattttacagcattccaacctggatatgacattcattgaccaatgttgtctaaggctgtcacactggggagaaaaggggtgcagccttctagatacgaagaccagcaatgccttctatacccgcatgtttataatctcaagattctgccccactccgatatcttctaggttgatttgaactgaagacaaggacacatatcttgagacattatcatattctgttcaggttacctggaagattaactatacaagtttcttccattaccaggaataaaaatttgagtcaaatttaatttagtattaaaggttgcaaatgctgatgtgctctgatagaagcgaaagcttggtgaatggggtgggatggggtgggggcaggaaggagacccacaagcagagaggaagaagttggttgtataggtggaagcttgagcttgggaggaaccaggtagggacctctcctctgaataaggggcgctctgggccacttcctctttcttcaaaacaattaagttgaccgtggaccttaatcacactagcagggcaattttgaaacaataatccgaaagaacttttgccagctacggcaacttttttatatcatggagatcagcctgaaagcaagctatttgcccgaccactttttgaccaatttattttcggtttagtcaggtttcttccaagtctgtgctaatctgaatggttaccttagtaattactttttgactaatttattttcggtttagtcggatttctttcaaagtctgtgctaatctgaatggttaccttagtatatcaatgtcctagtaactgtagcaaggacatttttgctggaaatcatttaaagcaggtgtatttgagtcatgtagcatagacagcggcatttactgcgagttttttacatctaatattgtttataagattttatctgttgtcacatttgtgaaatttatgaaaaaaattggttacgaacactatcacaaggtggcaaaatcaagcttagaaatcaattagtgactctgctgtaaaatagtatatatatacacacacactctttttaggtatacatttattaaatgccattagagttggtacaaaatacaatttttagctggtggctctctaccgattacaacgcagccagcacagcatacttgggttttcaagcctcgggagctcacccagcaatacatagctagggagaaggggtagggagaataaaaatcagcgaaagccaggatattaataaagagttttgatggttaaggacaagcaggcgaattaagactctggaaaccgagaaggtgtatagaaaagaaaaccagagagctggacgacaaggacacagtaacagcacaaggggattcatctaaagggcattccgatggagcaggcaggctgcgccccgaaaggtggggagaggttggaagcagatgggcaggcacaggcgagcgtgcactgcctgaaaaagttttcatgatggctccagcctaatttcccaacgctggtctcgggcgccacaaaacctgggcggcccgaccggagccaggtgccagcctcagggccgccgggcccggcgcagcgtccggaattcctgcgatgtctggggcgcggcggtggctcctccccgcccccaccacggcctccgccggcattttccggctaggaggcccgccagcccttcgaagaaccggctccacgcgcggacggtcgcggccgccgcgcttcccggggagagaggcgagcgcggcgcccggaccgcggtgagagccctccaggcccgggcgcgcggggtgggcttcccgggtccccgcccgaaggccgcggcgcccctcctcctccccctcccccgcccggggcagcccgcccctccccccggcgcgggcggggctgcgggcgccgacgcggaagcgcggggcgctagggctgcgggggcggcggcgcgggaggccgcgcgcgctccccgggccgcagtcggcgcgggcgcggggcggggcggggcggccgggaggcggcgggcgatcgcgcacaggcctggccgccgcctcgcccccccttccccagcccctaccctccctcggcctagccgtccccctcctctcccctcccccgggcgaatcacgcgccctcctctgacactcgtagcggacccgagctccgaatttatccttcacgtgacctgagggggttgggtggttggctggggacagagggggagacggaaaggagggaacggaatctgccgttacctgagcaacaggccccgcccgccggctcggggctggggggcgggaggaggacgtcagcacgtcagccggggttttgcgttttgattgacagttgctatagcgaccgggtcggtccgtcgccattttgttggttggtttttttttaaaccctttcgcttcccgcccgaataataataaaaagccccattggagtgaggcgggggtggcggcggcaaccgcggcgggggtatccggggagactgctgctgtcgctgctgctgatcgcggcccaggtcggcctcagagagcggacaccccgagcggggggtgcgggcgccgccgccgccgcttctgctgctgctgttcctgctgctgctgttggtgccgctgccgccgccggcgagcaggcgggaccggtgtgagtgcgagtgtgtgtgcgagggagcgtgtgcgagggcgattgtgcgcgcgagtgtgcgggtgtgtgcgagtgtctgtctgtctgtgcggggactcgggggcgggcggttcgggctctcctggcggaggagccgccgccgccgcccgggccccggcgcttctcgctgcgcaggttcggagcgcgcgccattttgtgagatttacaaaatcctcctcgggaagaagccgccggcagcagccgccgctcggcgcccggcctcgccgacgccgccctctgcgccgggccggccgtgcggccccgccgcctggaatcggggcccggggactgcggtatttgccggggagggggctgtcgcctccccggccccgggcgccgctggaaccgcgagccgaggagagactgagcaggctgcggcgcggccaggagccggagcgccgggggcggagagaggctgccggggcggcgctggctgcggaggccgcggcgggagcgcggcgcgggagcccgaggctgagactcaccggaggaagcggcgcgagcgccccgccatcgtcccggtgagtgtccggcccggccgcggccccgcccggcctggcgctcggctcccccggcggcccgcagccgggccggagccgaggccggccgggcggagggagggacctgccattttaggaggaggcgccgcgggcccagggccggccgccgggggagggagcctcaggccgggtcccggaggagcggcgggcgcgagcggagggaaagttgcggagggtgggagcgggggccgcggcctcccgggagccggggcctggggggccgtagacagcgccagaccttcactggccgcccgagcgaaggggtggaggttgtcttcctcctcctcctcctcctcttcctcctcatcctcttcccccagctcctccctcgtccctcctctcggtccccaccagtgtgggaaccgccggggtgattcgcaaggacaatgcacgggttaagaaaatggggccggctgccgggtgggcgaggacggcggggccgggccgggccgggcgccggcgaaggtcgggagccgctgcctcggcggccctgggggtccgcgctggagcgaggggcactcactggcctccgaagttgggcggggagcgcgagtgtccccggcggctcggggtggagggatgacctgcccggcagccgggggagttggtggctgaggagaggtgaattagaatagatacctgtgtatcgccacaaaacttcaccagtctatttataggcacaaacccactctcgcttcggagccaccaaagctgctgagtagctcagtacttggcgaaaggctcctccctaatctgaaatagttaaaaatggtaaaattagtgagtcagtgactctggttacttgcctgtgcctttcgcccaaccctaggtgacacgaatcccataatctgggcacagcgcaggaatgctagcaccatttggttcttgaattccgcccaaattgtcagaaaatacgccttagaacgttgttttcacaagtgccaggctctgtttttagggttttcagtggatcgaccagcttgcccagccggtaggaactgttcccattttatagatgaggagagtgagtctggagaggggcactgactggtctaaggtcatacagctgggactccaggagccagaaggctgtagccagtctggagttgtgaatcattagggtgtaactcattattagaaatactggcaaattttggagtgattcgtgtttaatgactcagggttctaacctagagatgtgtccccgtaaggtttttagcgtggaattacctttgtggcttgccgaggccaaaaggtaaggtaatggtgatgaggcctgttaataaacttttcaggcctttccccccccaagaaaactatgtagtcaatttttgaatgaaaggaattaaagatattccttgatgtgttttgtacttcaaacaattttgattatagtcattttttgagtattgatgagtcataagaaagttttgtgtaaagttatttttagttattctttgaatgcttaagggttcctctgtgacccttttatagtttatgtgtccaaagtattaatgaatatatttagcattttgattttgaggtgttttaataactcaggggaattacctttagcttttgtgttgtttaatttctcatgtcttgatcagttactttaggataatattgttttcaagtagacttttaaaaatgtgagaccagaactaaagtttcatgtgttaaggttttaagctgcagaagatcatttcaaagaaactggttatgaaaaaagcttacttgattatagtcaagattttttacgcatacttcaggtatcccagtactttggaggattttccctggtatagcagtggtgtttatggtagctgtccaaatttatttatacttcaaaccatgccagaaagttaaggatttctgtcaatgtctacacctagttctcttgttaagactagtaaaaagttctcttgtaaaaagttcatttttacctcgagaggcataagctcagagattattgcaggaggaagggtcaccccttgtgtttgcgccatgaaggcacactcctttttacctggtgggtgttgaaaaaatatttgaaggaatagacctgaatgaatggtaattattggtaggggtgggaaatggactaaatgacctagtgagatctttgttttgagatctaagtataagatcatctcttaaaccttttaacaatattttggtggaacctattagaaacttaacacattattgtgtgcaagatatctaaaaataagtccagttttttagaggcagtaacatttaagataatttaaaacattccatattagtgtaatgtcttgttagggaatgtggacagtaaaaacgaccatttgttaaattttttttcccctccaaaatattgtctgatgtttgctccttcgtgttacttatggagagttactgtttatgacttaaagatatgggggtggagaggcctaggtaactgcaacaatgtatttaggtaatttacattaggtttttagagggctatgactatctgcaaaaggaaaattcaagataccttgttataaacatggtatacagtgacctttggcatgcattttgttttgtaactacacgaagtgttaatttggattgaatctttgttttcacttgaaaaccttttttttttttttaagaaatagcttggaaatttaggctgccctgaggtgttttcgtgtgtctgtttatggttgacaagtatctagttatgagaagaaaatgtggatagaattaactgtattataggcgagaagggaattgccttataatcttgtgccactgaacacaagattagtagaagagtgggcttcacttgtgactttcttggtatttgtgattaggcgtgtgccagtttgtctttgctttggcattagctttcctcatatttgagaaggctttcacgtttcctgtacacacacaggaagcagtttcacccctccccaagaaaaaacttatctaaacccagcaaaacccaaaaacttccagaaagtctttatcaagaatttagttcctcatccccaaagttgtgttagtcttattttgtagtaatcataagcagttatttaaactgaaccaagaatctttactttctgttgagtgttttggtgattttacctccatatatgttcgtctattttcgatttagaagtaaagatattacgtgaaactattagtaatgtttcctgaaacttgatactaacagtttgctctgtgaaagtgaattgtgtgaccagtgtaatagcaccttatgtatatatggtggttttgccttttaaaagactttttaccagatgttatcttgactgttgggcaattttctgatggctagagaggtggtaatttatgacccaaagcttgctcaactttggattaaaaagtttggagagttaaaatttgtgtttaattacttggaaaaatcagcaaattatattaaattacctaaaatttctcctcagttgctcccaaatgaagaaagctttttgaaatcttgccttatgtcagtgctacaattttaagctagagttgtaaagtttaccatagagtgtttgaaagtgaaatgtagacttcatgtgactaaaataatcattgaaggttcgttcatattgggtaattgaagaaagatcttatttgttaatactggctaccagcagccttagtttgattattatttttttatatggaaacaaaatgatttggaaatattgcactgcgtaagccagctaggtatttaaaaagttaagcttttgctttgaaatcctacttccagagtactaaaacgagtgagaattgtttattggtgataataccctacgttgaacacgtgaaatggtgtggtttcttttgggcatatatgttttgctaatgtagaaccattttggtgtcttggcaattggttcttataccagagctatgtatcttctcttctagaaagcgatatttaaaagtttgtattactgttaaaactaggttttgacaagttacataatttttttttggtttggggcagatgctcatatctgatacatagtgagtaatagcttaaaatgtgtctttgttcttgtcagtgaatattcttgttttatctccccatgttagaaaagtttgttttaattgatttttggggggggcccagtgaactggcttaacatagaatgaaactggctttcagcatcaactctattttaaataacatccctgttcattaaataaccccctaatttttcttgagtgtataacatttccaatgacaagatttgattttttaatttttaaaaaagctttcacaaaaagcttttccgtattatcattatctatattatttgataatatagagccatttcgacatcttggcagttggttcttctaccagagctatgcattttctcttctgggtttttcacaaaagcttttgcatgtccgtaaaatgttatggacatgtatggttaaggcttgcatcttggcacccatgtatttgggtaaaaagatgcttgaggcctggcgtggtggctcacacctgtaatctcagcactttgggaggccagggtgggcggatcacttgaggccaggagttcgaaaccagcctgggcaacatggtgaaaccctgtctcaaaaaacaaaacaaaacaaaaaaaaaacaggtgtgttagtgccacctgtagtccaggctactcaggagactgaggtgggaggatcagttgagcctgggaggtggggggttgcagtgagctgagattgtgtcactgcactccagcctgggtgacagagtggagcactgtctcaaaaaaaaaaaaaaaggtttgaactgtgacatctgtctgtctgcttgctatccagttatagacagcagttgaggcagcatgatactgtggaaagatcccctgcccatgaaaccatgaacagaggctccagaatctggctgatctgagtctcaacaggttctgttggctgtgtgactttaggtacagtgatttcaccaaacatcagttccctcatctgtaaaatgaggttgatagtaattagcataggaatcttgtgaaaattgagataatgcatgtacatttcttcatggatttctttctcctccttttttctctcctcatcttcattcatgctcattctgtgatcctagcataaatattttcttcagagaggccttccccaaaccaggtagtcttccttggccatgcattcttttttttggccaagcaggaccatttgtttttctttgcaacccttactgcaaatatgattattcatatatgttcttatatataattgttcattaaatttcatttaatataattgtaaatttaatttctccattaaattttaaagtccatttggacaggaagaagtttttcttgatcatggctgtaactccagtgcctggcacatagggggtttagattcatagaatgatagaatgcggaacctgtatgttgaatccttcctgactaccactccttagccatgtcatcttgggcaaaacagcttctcctcgcttcagtatcctgtatgccagatatagatagcaccggctgccctgcccaggattttgagaatgtgaaatgagacactataatgaagtgctgaagtgtaaaatgccatataaatataaaatggcacagtagcaataatctcagtaatggggttattcagtaggaagctctattgtgacttaagagtatagaattttagctttgctgagttggttggtagctaatatttaagagttacgataaatttaagctttcttatatgtaccagttagaatgtagatgggcctgtttctgactaaatacagtggcttaaacgagaaatttatttttccttcataaaacaacagtataacttatctaaggctgatatggtggcaccacgatgtgagggagcttggttccttctgtcttgttgctttcctgtgcttaccattttcttcatagtacaaggcagtttctcactacatccacagtccaggaataggattttgggaaggcacattccatccctttaaagacaaacctggaagttgcatacatgatttttcttcataccctattggtcataacttagtcatgtggccatgtttagatacaaaggagtctgggatatgtggtctttgataggtgactatttggctgaaaatttgggtctactgaagaaggggagaatgggggatgattaaacattgcctgttacacttcaaaatgttttgggagaagcttccagaaatagactttgaaaatacaatggattgcattagttaataagtttattttctgtatttaatcattaattttttaaactatggtatgtgaattcaaatagaccgttatgcaaaatataagtaagtggtcagattagaaaaatgtagctatacttttagtagtgaagggattttgggtctaataacagttattttactgacgctttattttctgatagaaacatggttcttgattgctgtgcttgtatcacgtaagcaatatttgaaatctgagcttttgcatttagtgttaatagtccactggaccaactgaatgtcttcttgctcataccctcagcaaacaatgctacaataacactcgcatgttgtcaggatgtcataaagatttgagtcaccgaacactgcaagaaggatgatagcagagatatttaaacgtacatttactatctagtatgttcctcttgaattcctgtggatttgaaaaaagagaaatataaatatctaagattcccttaaactatgaaatattattagctctagtacagacttgggaaaactaatggttcccaaacagtcttctggagaacttgtcaaagttaagagatttccaagctcagatgcctctctttctgtaggtttagagtgatgctctggaatctgctttctttttttttgagacagagtctcgctctgtcgcccaggctggagtacagtggtgcgatctcggtttactgcaagctccgcctcctgggttcacgccattcttgtgcctcagcctcccaagtagctgggaccacaggcgcctgtcaccacgcctggctaatttttttgtatttttagtagagacggggtttcactgtgttagccaggatggtctcaatctcctgacctcgtgatccgcctgccttggcctcccaaagtgctgggattacaggcttgagccactgggcctagctggaatctgttttcttaaggactccaggtaatcctgatgcagtaggaacattttgagaaacaccaataaagttcatttctcacatattagagaaggaagtgggtgcagagaagctgagtgactaatcagtgcctcagaataagcaggcctgggactagcattgtttttcctgactcttcgttctttgttctttctacagaagagggaataaaggacaaggtgtacagagtgcagtgggattttataggaatagttatcatcttaaagtaagtatgtggcttttaatgtgggagcttatgtctagtgaatggttggcccagttgtcctttttgccctatagaaaaataatgtgaatatttaaatactcaagtgaatgtttaaaggttaagtgaatatttaaaggtgaaaagctgaaggttttaagtaaggttttgttagtatcagcactattgtgggcaatgtatatacagcattagaatagatgtataggcagctacttacttgacatgattagaaggaacaaaggtagttcttgtcctcaaattactactttccttttaggttgcttgtaattttcactgttggaattcatttcattagattaagataaaatctggaattctctagtttaaaattttaaaattagaatattcctagaggaatattactttttttttttttttttttttttgagatggagtttcacttttgtcacccaggctggagtgcagtggcacaatttcggctcactgcaacctccgccttccgggttccagcaattctcctgcctcagcctcccgagtagctggaattacaggtgcctgtcacatacccgactaattttttgttatttttagtagagacgggatttcactatgttggtcagactggtctccaactcctgaccttggcctcccgaagtgttgagattataggtgtgagccaccacacccagccctggaggaatattctttacctgttatgaggttaacactttatttgtatcagttattattattagatctagcctgaaaacccatagccctaaattggaacaggcatgcctgtttttgcacccaaaagttgccttttggcccgccaagcccccctcttcctataccaatataaacctgaaaccgcaggccccacaagcagacgaggagatgaagaacagaatgacagaatggcttggcagagagaagagagagtctgagtgctgggaggagttccactgggagtggtcaaaggggagaacagctgcttagtgcaggtgtcagtccagaaatcagaatgatgcctgcactaagaatgttttggaaaggagggaagaacacagtccatgtgccctttactgagaaaaatgaagggtatgtttaggccaggcgcagtggctcatgcctgtaatcgcagcactttgggaggccaaggcgagtggatcacgaggtcaggagttcgagaccagcctggctaaaatggtgaaacccccatctctactacagatacagaaattagccaggtgcagtagtgagtgtctgtagtcccaggtacttgggaggcagaggcaggataattgttggaaccctggaagcggacgttgcagtgggctgagatcgtgccactgcgacagagtgagacttcgtctcaattttttttttaagggtatgtttaagaaatatcaccttgtggtatggtcatgggaaggttcatgtgagtattctctggtggccagaggttggtagtgttagcttgcttcgatggcttcctatcactgagagtgttggtaatggcactgtgggtaattctgcctaggaccctgcgcttgattaactactggactagagggagtgtccctgttttcttactgtcttatttgttagggcccgtatttgagcagtgttatcaaacatataaggtacggttctgatcatctaggatattctagtttttaaagagatccacaagtagtatatagtttaaaaaaacaagctctgtggaatgatagcagatcatttcccccttctcatgttccataataataactgttcagtttttcctaccagaaatgtatgcatgtgtatatatacacacacaattatatatattatacttttagtatgtattgtgttagaaaactatgtatgattccattatttttaagtgcatagacaggtgtgtgtgtgtgtatgtacacagtgtctgtgtatttaaaatccaaaccaaatgggatcagacatactaaacacacagttttgcaacttaagctttttatttatttagttagtttttgagacggagtctcgctctttccccaaggctggagtgcagtggcgcaatctcggctcactgcaagctccgcctcctgggtttacgccattctcctatctcagcctcccgagtagctgggactacaggcccctgccaccacgcccggctaatttttcgtatttttagtagagatggggtttcaccatgttagtcagggtggtctccatctcctgacctcgtgatccgcttacctcggcctcccaaagtgctgggattacaggcttgagccaccgtgccccgcatttttttttacttgacctatgttagaaatatttccatgtcagctcacagagctcccattttttaaaatttgggacagagtctcgctgtcactgaggctgaagtgcagtggcatgatcatagttcactgcagccttgacctcctgggttcaagcgatcctctcaccttagcctcctgagtagctgagattataggtgtacaccaccacacccagctaatttttaaattttttgttgagacatagtcttgctatgttgcctaggctggtcttgaactcctggcctcagtgatcctcctgtcttgtcctctcacagtgcagctgtgagacactgcccagcctctattgttcttaatggtcggaaagtattctgttctatggttgtacctctgtttagtcagactgcattaaaggacatttaagttcatatttttgctcttttaaacaatgctggtgcgtacttccttgcatgtatagttgtgttctgtgagtattggccataggatgtctatttataaggaaagtggctggttcaccaggtatatggatatttgaatatatgttgccatattgtcttccagaaaagtagcagtagtttatgctttcaccagcagtgtctgagagtgtatagtttctcaaatctcaccaacactgttgttaccttagatttttgtgaatgtaataggtgaataatgatgtctagttgtttggatttgcatttctttaattatgactgagtttgaacaccttaagttgtactataagatttttattttaaataacaaaataattcattcttcatcagatgtatgttatagttaaagtatttcctgggggccaggcatggtttctcacacctgtaatcccagcaatttgggaggccgaggtgggctgatcacctgaggttgggagtttgagacgaccctgaccgacatggagaaaccctgtctctactaaaaatacaaaatcagccgggtgtggtggtacatgcctgtaatcccagctactggggaggctgaggcaggagaattgcttgaacctgggaggcggacgtggtggtgagccggagatcacgccattgcactccagcctgggcaacaagagcgaaactccatctcgaaaaacaaaacaaaagtattttttgggttccctttatttcgttactctgttgattgaataactgatgttttgataaattgtaaatgcctacagaaaagggggctcttgttcttcttcaattgagtgaacatttgcatgtcctctgtatgagatatgagtcgtggtagaagcttttgattataaaagtgaataaggtttggttacatctgcttttaatgttgagataggtgtgtcaatacaggaaaacttgaacacagataagaccatggccgttaacagttagaggggttgacatgtggagagctagaagagcacaggaagtaagacaattatggggattcgagtgtgcattgtggagatgggactgggtctcgatcttgaagagtggatggatgggctttttatggtggaacctgaggacttgacagtctattggaggaagtcatgtgggcaatgggtggtggtgggaaatgaaggtgactttgaagaatgacagagtcatatccctggagcatcagatgagggagagagggagggagagtgagtttggtatgctcagggagtgaaggggacacttgtggacatgagagtggggttgagtcttaatattataaagatatgaatttggggcgattgagggtttttcagcagggattaggacagatctgtgggttggagggaggtgacactgtaagaaggagggtttggaaggcaggaccattctagatgtaatgtataggcatgagggaatacgaagaggtgaaaagtggaagacagatgggaaaaccttaaaaatattcttaattatactttaatttccaacagaccaaagtgagtatttctggattcaaacagcaacatggccaagtttttggagataggaaaaagagtattaagctttgttggcagtatactaaaaggttctaggaatgcagtgattaggttttagtgggacatggagaatatgtcctactgaggacctgaaggaactgttgaggaactgaagatagaattattattgtagttcagaccttacattagggacaggtggaaataatttgcagcaccattaaatatgagctaaaaaatagggcagtgggagagggcaatgtttgaagctgtgaatctgtaaaggaaaaggttgtatcataattcatggtttggaaaatggagagtagctgagcatgtgagcagtttcattttttctgagcatcttagtatttgcctgaaaaaaatctcatattctctttattttttcatgtatcctaattggaagactggttatttaaaaagcatttatcttgtggagtgatagaactatttattgagcacctgctggtgccaaatatagaaaaacctggggcctgggaatcagtgctgaaacaaaggccactcctgtccctgctatcacggatgttacgttctggctgggggaatctttaatagttcttgagtaggcctaaggacttagtctagaatagatacaaattaaattttccttaaagcgaacatagagtctataaaatggaataatttttgatgttgctttttgaaggtcaaaaaatttttgtttcattttagagtccttttaacagttaattttgacttaaaagtttgtttggataaaaataggactctagcccttaagacaaatactgtctgttgaaaaatttattctgatttggttattttccctcgaaaaaaacaactgttaccacagtggtgttttttactttatctttacatcaaatgttcgttattgagagacattgcttctgtgatataaaagattgttttgtaaaagtttgttgaaacaacaatggtaagatcctataggatctcattgagtattttacagtttaattttttttttttgtatttcgttgttgtggttctgtagtacaatttaaaacatcagtaaagctaggtaaatttacctaggaattggcctgaaggcccacagttactcagcaatattagagacagctatgcaaagggagaagccaggcgttttaagattcacgggagacagtttgtaggaaggctgtttgctgaataagacaaagatacagacatgcaaagtaaaggatgtgggcctatagggaaggtcaaagaataaggaaagttcacttgagtgagcagaaatggaagagggatttaagcaaatagatgaacaagaattgtctctcctaaaaaaaaaaaacctacacaattatttgatgatttattatgacttttggggtagagaccacgctagtcacaggatctgcaagccctgccacctggatgatctggctccagctggctcactgcctcttctcaccagtctctggatcatgtgactgtaccggctcctagtctttgcatatgctgcttccttggcttgggatcatcacttctatcagctcttctatcccttctatgcgctcttcgttttaaaaatctcatgtgtccttgtactcttccttcataacgcttattacagttgataattttttagtgcttatttgattaatgccctccagagatgaggaccagtagtgttttgctctctcttgcaatctcagtggttggcagggtgcttggcacatagtaaacactaaataaacatttgttgaatgaatcagtgaactacatgctttggtctttactagttggtctcaaggaccaaaaacctacagtaggaagatgtttgttggactaagagattagcaggaaatatgagagctttgaggaaaaaggaaaagatgaagttttttaaagataggattagaaagttctatgtagtcaggagaaagaaaattattcgtggaataattcaacaaatgcacatgaaatgcctactatgtattgagaattagatactggaaatgtggagtggaaagattctgtcttctgtattaaaggagtgtataattgtagtagtttactgaaatggggacagtccttagtggttgtttggagcaggtgtaagttgtggagagggatcagcctggatcaggatattcttcactcttctagccgacacagtgaagttcattcagcagttatatctggaatgtagctctggcatttgtagtagctttcaggtgcatatcgaatataagtgctatagccaggtgtggtggtccgcagtccagctactcgggagcctgaggcaggaggatcgcttgattctgggaggttgagggtgcagtgagctgtgtttgtgccagtgtactccagcctgagtgagtacactttgagtgataccctgactcaaaaacaaaaacaacaacaaaaatccctgtagctttgattatttgtttaaagactgacagaatagttcatttggattctttttggctttaacttcaagtttggacaacagaacaagaatgaggaaaagtttgtagtatggacaagttttcaaaagaatgagtcgtgtagttagaaaattgaagctgttgatcttgtcagctgaatgagctttcttaaagcttataaagggatatgtttgaatatagttttataacctttttcagtgactaatttctgtagtaaatatttggaaaagcaaatcatcacataattcctgcaggtctctttgtgcctggctccatgctaagctcttgggacataatagtgaatcagatggatattcatggttcctgccctcatgaagcttgctttctttttttttttaaaaaaaaaaattaaatttttttttatagtgatctcacttttacggggatctcactttgttgcccaggctggtccaaactcctgggctcaagtgatcctcctgcctcagcctcatgaagcgtaagccactgtgcctagcagttgaagctttcagttagtcagaactccctggagtgagtgtaaaggaaaacctggcttgtggattgggtgagcagttgtattgatttacttatttatttataatttcttgaacttagttttggtagcaccgttttaaactactttaaactacttgttgctttatttctggtaacatagggagtgtgggatcacacttactttaccaaggtaaaataaaaacttggatcttcaaccttttggcagattattttctaaaaaaggtattcttgtaaatctgagtttctcctcttaaaaagcaagctactatttagtaacagtaacaatagctactattaatcagttacctgcagcagaccagccactggcctactgaatgaataactatttattattagttattttaatatacctagaaagtgattggtattatccgtgtttacctccagataataaaaagcctaaacagttaagtgccgtaaagttgaacatttagagaaaaagaagagtttctgtaacccattaactgaagaaatagataaaagttctggcatgctgggattgataccttgtgttattggttcattagtttttttggattataaacaagataatctaacacctttctgtgtttggggaagtctttatcttaggagtctttgtgagagggagagcgatctccaccattaagaaagctaattgttcactttccccaccgcttttgcagttaggatgcaatcctgtggcctccatgactggcagtgcttgcctacctcagaggccagtgatctgcagaggcaggcggtatgtagaatctgtattctctagtcaaggagggatggggatgggatagcagcttatcttttccataggcagcagtgactgagattccagttgcaacacttagtgcctggtgttggtatcagtataagttgcagtgactgagtctcatttggtcttcactggaccatatctgtggtttgaattttggatgttcttaactatgtagctttccagcctggtccccatggggttttctgtgagttgcctaatacactttaataacttcctttcagcttaaacaaagccagagccagtttctttgtttgcaactaagaacctttacttggaagatgctaattaagacaatagataattccaaggaactctcctgggtcaggtttacctgcatgtagattagaatttactgagaagagttcacagcatatattaagtgaaatacttagaaacctgtttattgatttaattagtttgctgaatttgagtgcctcttcttggctgcgatatgttttaggtgttaaggatacaggagtgacaagattgacaaggtccctgcactcacagagcttatgttccattgtaagatgtagagtaaacaagaaagcaaataacataattacaaaaagtgataaatgccatgaaaaaaataaagatggggtgatgtgataggtaatggtgtatgtgtgtgtgtgtgtgtgtgtgtagttgtatcttagtgtaaaacatttaaacttcagtgtcaggaatcatggcttctgcttttgactattctgaatttgccttcctactgtaaacatctagaaaactggacaaaacacagggaagaactgttttcagatatcagataataggtagcacagaactgtgatccctgacagatgggaaccaagtgagatgagccctgtgatggccagttttctgcttgaaggcacttttcacacctcagtgcaggaaggggatcccagataaagccacgtggccccactaagttgagaaaacaaagattggagttaggggtaaccaagggtggttgtcatttgaggagcagagttccagagaggagggagctatactgagaaagagttcttatacatctacttagtggtccccttaaatgtttgattgtacatgtataaggtgaagtttcacaaaagaacagtttctgggggagctgtaagcagaaaaaatctcagagtttacagagggctgagaattatttgagtaccttgtaaccagagtggaaatgcaggattcattgagaccccagaagagttatgtcttggtagtggggctaaactagtcctgaagtaaagactcctagctttgcctgaaaaaagcttaaaagcaagccttcaaagaagcaaactaatctgaaactaatgtaattgcctgttactacagtgcccaacattctttaaaggaatataacagatcccaatattaatcatgtaaaatgtccagcatgcaatcaaagattactaaatgtgtaaagaagcaggttaacatgactcataattaggagatcaagcagttgaaacctagaactcacacagatgttagggttgacagacaaggatattaaaacagttattgtatttcatatgttctgaaagtttggcagaaacgtggaaggtatacaaaagacccagatcaaacttttagcagcaaaaattataatatgtgatatgaaaaatatactgggttgcattaatggtattttagacatttagaaggaaagattagtgaacttgaagacacagaagagaaaactcagtcaatagaaatagtaatgacaggtaatagaattagcagacaaggttgttaaagtggctgtcataaaatgcaggatcagattgtggttaatgttgacatcttggacgtgaggtttgcttaagaacaattgtgacaagcagaagttggcttcatatatacatctacatgaagttagagtagttgaaaatcagtatttgagcagagcagggactatggtagaagaactttattatgtagcagtatgtttatctcttgctaaatgacaatatcaccacagagttagtagcttaaaatatacacttccatttattatctcagtttctgtgggtcagatgtctgagcacagtttagctgagtccactgctttagggtcttagaaggctgtaaagatgttggctgaggctgtggtctcatttgagacttaaccacagaaagatctcttctaagctcatatggttgttggcaggattctgttctttgtacgctgtcaatcagcaaacatttgccatcagtttcttgccatgtggtcctttctgacacacccacttacttttgcaaagccagtaaaagagtcaccttgcaagaggtgtacatcttaacgtgtcataaccatggacatgccatgccattacctttgttgtattctcttgcttaaaaacaagtcacaggtactgcccacactcggggaatggtgtgcacaggatgtgaacactaggaggtgggtcatgggagcctccatcaaagttctctgagcttttctttcttatcgcttcatgacttgtttcaccggaattttagagctattaggctttattgctttaagaaagcacttttagtattaccataccatgttcttctagttaatggagaaattagtctgaaagattttccctctgtttctgctcttcttccctaaaatttgctctgcaaaccattcctccttcagatggtatgaaggaaataagcctggggaaaattaccttcttggagattgacagctcacattagcatattgtaggaaaccttctttgcacccgttaacatagttagggcaatctttattaagcttgccctgagcactttataaacgtacacataccactagccagtaaggtactgttttcatttaacctatgatgaaacaagcttagaggtgaactaattttcccattttaaatgggaagtggttgatagggtaggattcaaaccaggccttagtttccactcttagattttattctgtattccttctatattatggtgagttgtataattatttcactatatattaatattaaaaggtaatactaatagaaataaagtgcacaataaatgtagtgcgcttgaatcatcccaaaaccatctctccacccccaacccccaccctgtcctttgaaaaattgtcttccacgaaactggtccccggtgccaaaaaggtcagagaccgctgctgtagagcaatacttgtcagactttctcacgtcggggccttcatggacgaaattgaagacaccgttttgggtattctgagggttttaggggatctttgcacatctaaaacatctgtggtgctgtgtgccacacacaacagttggcaagctctgccctataggtaatcactttttcctcagttcttttagctgcttcttcaatttacctgtctattctaaacaatgtgcttgttttatcaggatgcttttggatgcagctattgaacctgacccatactggcttaaaataagaggacttaactcacaattggaattccagggacaggctcaggggctaattgatttggtagcacagtgatgtcttcagggccccaggttttctcatttccccctttagtcactggcaggctctatcctcagattaatcagatggttgcggcagtgtcaggagttggattcagatgcaacagtgcccatgggaagaagggaagattatttttcttgtagctggataagaatgtggtaccttggcctaggaacacgccctggattcaggaaagactcactagaaagggaaatgggattacacttagaccagttaggctcactcctggcactgggcacgctctccttgagcacatgtctaaatggacgtgggtcccttggcactgggcatgctttccttgagcacatgcctaaatggaggtgggtgtgcaagtgggttctgaacaaaattagcttctgttacaaagaaagaaagggaatttggaggccgggtaggcaaccctgtccctatttttgtatttgccttaagatttaatacattatttgttgattttatttaaggtcgatgcctatttaacattaagccacctatcacacttttttcttccagctcctgattatagttatataatcttttttggtaaaatcaatattccatgcttaattatgactaagttttgttcaccataaaccagattgtgtactatgattacattttccaccttgtataatcttgtttttctaagagttagtaattgtatttccattcgctttgttttctagtacttgtaagttttctcattctttttagtagccactcaatgtagtttttggtataataaaaaatatccgacagttgtttttgttccctcttaagaaccatcttatagagcctcaatcaaactgctcctctatgaaattcttgctctctggacctaataggatcccttttgcatattttccagcatggttggatctcctgtttcctggctttctggccattatcgtttctgtttttatccttcgttttactggaggacatctttcaatacttcctgagaaaagggtacatgggaggctaattttttgagatacggtcagaaaatacctttaatctgctttcatttttaaaagttttgactgggtatagaaatggagttggaatgtaatttttactgagaattctgtatatgtggcttcatggccttctagcttcatacagcagatacagtttgaattttggatttcgttaaaaagaaaacacaacactatggaaaaggtagaaaatataatgagctccttgtactcatcattcaaattcaacatgtgttaactcatgacctctttataaatgtctgtgtttttatctctccctcttcccttcatgacctccttataaatttctgtgtttttatctgtccctcttccctttgattttttttttttttttttttttactcttgcccaggctggagtgcagtggtcatggcatacagcagtttcgacctccctgggctcaggtgatgccacctcagcctcccaaatagctgggactataggcacataccaccttgcctgactaatttttctgtattttgtagagacgggggtcttgccatgttgcccaggctggtctcaaaactctgggctcaagcagtccacccaccttggcttctcaaagtgttgagattacaggcatgagccaccagcctgaccctgcctcttttgcatttgtaaaagcaaacctagatgtataatttcacttttgaaaattttaatgtgtatctgtaaaagataaggatgctgtagcaccaattcctttgtcatacctttaaaaggttaacagtgagtcttccagtatccagtaagaattcacattgccttgtttgcctcatcaatattttttttaacagtttattttaatcaggatctaagcaaggaccagaaattgccttgtttgacaaatcttttgagttcttttttctccattttttttttttcggagtctcgctctgtcgcccaggctggagtgtagtggggtgatctcggctcactgcaagctctgcctcctgggtttatgccattctcctgcctcagcctcccgagtagctgagactacaggtgcccaccatcatgcccggctaattttttgtatttttagtagagacggggtttcactgtgttagccaggttggtctccatctcctgacctcgtgatccaccagcctcggcctcccaaagtgcagggattacaggtgtgagccactgcgcccagccaaaaaagtttgtactatattatttttttgaggtggaatctcattcactctgttgcccaggctggagtgcagtggccaaaaaaaagcttttaaattaaaaaaaaaaattttttttttaagagatggagtcttattgtgttgtccaggctggtcttgaactcctgggctcaagtgatccttctaccttagcctcccaaagtgttgagattacaggcatgagccaccactacttggccttacttttctctctctctctttttttaaaaaagtatatatatatataaacaaatacatactgcagtcttgacctccctgggctcaggtgattttcccacctcagcctcctgagtagctgggaatataggcgtacaccaccatgcccgactaattttttagtatttttggtagaggcggggtctcattgtgttgcccaggctggtcttgaacttctgggctcaagcagtctgcccgccttggcctctcaaagtgcttggaatacaggtgtgagctactgtgctgccttaaaagaatatttctgattcgaggttggttgaacttatggatatatggaggactggttttttttgtttgttttttgttttccatcatagcgttgtctcagtttcctctggattcctgtttctctgcttgttttggtttctttccttgatgttggcagctttcctcaaatatttggccatccttgggcatgtggcttgtatttaggagtaaggcataaagctgatgagagctctttgcgagggtgaggcttgttcgctggaggcttagtaggcggattggtggacccatgaatatgagtatccctaaggttttatggcagtgctcttgggtctcaggttggggttgtgaatcccatgctggtgttctgcaggcagaactgtggaagaagggctggcatgcacagttctgtctaaacacttttgctcacttctgtagtatttacttatgtattttgttttttgtttttttttttttttagagacagggtgttgctcacttgcctgggatggaatgcagtggcacaatcacaactcactgcagcctggaactcctgggctcaagtgatcctcctgcctcagcctcccaaagttctaggcttgcagttgtgagccactgtgctcagccttcacttttgttttcagtcctgtgcctcaaacctattttctgttgtgcttgatacctgtcagtaccaagtctccatattcactggtccccagagaatatgtctttgatgtctttggagctaggatagttgccatcctggatggggtttgggccgcaattttggggtcttattacctttatttatttttcttgacaataactgagaaaacttgcaggtatggtacaaatagcttattttctacaccatttaaacgttgttggcatgaagtccattatttgaaaactgtagtgcatttttcctacaaacaagggcattctcttacataacagcaatacagccatcaaagtagcagtttaacatggagacattactgctatctaatccatatgactccattccgtttttggcagttgcccccatagtgtagtgttctttatggggagagaatgttgcctaggatcatttacacattttgtcgttactgtttttctttttttatgagacagtctcgctctgtcactcaggctggagtgcagcggcatgatcttggctcattgcaacctccgcttcccgtgttcaagtgattctcctgcctcagcctcccaaggagctgggattataggtgcctgtcaccacacccggctaattttttgtatttttagtagagatggggtttcgccatgttgcccaggctggtttcgaactcctgagctcaggcagtccgcctgcctcagcctcccaaagtgctgggattacaggcgtgagccaccacgcccggcctgttactgtttttcaactgtcctgatttagaacagtttcttacctgttctttcttttgtgatgttgatatttttgaggaatacagaccagtgattttagagtgttaccctcagtgtgcgcctggtgtttcctcatattagatacagattagatgtctcaggcaggaatgatgctgttttgaattttgatgaagtctaattattaaaagtttcttttatggattgtgcatttgttaccaaatttcagaactcttcctagtgccctggttctttggagtggagaatggcatttggaaacctatgtctgaatgttaggtgtgcttggtagtgttagtgtgtgggcgctcctcggctttcagtggacagagccagagaatatgtgcatgtcctgagcctcctgttcgtcctctttccaggtttggggatacatgagctagtttccttggcatcttcaactgtagacacttattctgtggcttcctttagtctcctaagcctgccactactgtgccatcttctatccattgtctaaaaacttctttgtccatcactgtcttgtatcttgttttattattttttaactactgattttaggtgagttttatcttcagtgcagttttgtgagagaacagaggtaaatgtatggattattcaatatgttgtttacttgctgaagctttaatactctttcaaaccaatttttgccttttattattttttgcagtcctccttaaccccttgtttacctgctctgttcctgattgggctgttctacagcctataatcttccacgattctcctttgtatggaatgaagacaaatttattaaactattcagattctcttgataacctagccctagtttatctttccgttttcttttctgcagttctgccatcttccctctacttcagagcttacattttcccactcgtgttaggctcctcttcagctttgcctttggagcatactgtgcttttctgataacgttttctatatggcacagagcctctgccagggcatgtagtaggtgtgttcagtgcattaaacaaacatacagatcctctaaactagtaaagccacccaagcttgtttgttgcctgttatcattttccaaatactgtcatttaaccctcaaagcaactctgtaagccattatccatctttcataaatgatgttgagtaaattgcccaaggttacatagttgtagttgttaacactgaatttaacaaatgtttgtgtgcctgtatgtgacaggctctttgaggttgtagagacagttggggaataaagctgacaacatacccctaatggaagcagtgttaaaatgctcaatccaagtgaggttgattttggggcaagtcttctgtaacctgacgtactcatctcagatgtcatctcctgtagtctttcctgactttcctagaaggaggcaggggagaagtggaaagaatagctccatcttttgttctcattagttccttcctttcttattgtattatcatatatagcatttataaaattattatttgtatttgaggcatgtcttggtctgtttgtgctgctctaacaaaataccttggactgaataatttataaaaaatagaatttatttttcacagttctggaggctgagaagtccatatcaaggcaccagcggattcggtgtttgccgaaggcctgctttctgcttcatagatgatgcctcttgccgtgtcctcacatgatggaagggcagggcaacttcctttaacctcttttacaaggacatgaatcccacagttccccaaaggctccacctcttaatactgttagggcctaatgtagaaattctgtggggaacaccagtattcagactggtcatagtctgtgctgctgtaacaaaacacaggttaggtagtttacagaaaacaaaataatttcttacagttctggaggatgggaagtccaagataaaagtgttggcaggattgatgtctcgtgaggatccagtctttctgcttccaagatggcgtttcaaacgctgcaccctcttgaggggagaaatgctgtgtcctcacaaggcagaacgtgaaagagcagaagagaccaaacttcctctgttaagcccttttataatggcattaaccaatctgtgagggcaaagcccttatgacctgaacatcttccaaaatcctcatctcccagcactgttatgttgtggatgaagttttcaacaaatgaattttgggggacacattcagaccatagtagggcctttgatagattgagctgttttggtggggagctgtctctttctggtatccaggatgcttgccacatgatgtgtagtctcagtaagtgagtgcattgataaagaagtatccatgatgtgctttaccgacagcaggtagcagtactctctgttactcaagactgcctctttgtaagggtacaagtagtttcagaaactccactctctgtttagttgggaggatgtgctctcaaagaggttacctacaggcacatttttaccggagtttaataaactgtcttttttctgggtacatataggtctctggtctggaagatggggtcttgactccccaaccaccaatagtaaccatctggtaggagttttgaattatttgttaaagaagtatgctgatatgagatgtcacaatgtacaagcctcttttcaaatcaggagataaattatttcagaagaggtagaatgtttattttgaaacattttacaaacaggtttgttgtaattctttccttgtatttgttgtcatataacatgttgaggttatctgttgctgcttaacaaaccatggcgaaattcagtggcttaaaacaatattcatttctttgctcactgtgttccaatttgggcagggcctgtctccatcccacgtggcatctgctggcactgggcagtccaaggtgatggattcccttccatgcctggtgccctgggcatcttcctccaggtggcctttccacctggcacacttgggctttctcacagctgtgactggtttccccacaagtgcgcaaagttgaggctgccaggccttcttaagacttacaccttgaactggcagtgtcatctccactggattctgtaggccagaagcaagccacaggccagcccagattcagggggttcggggtggggtggggattgtacaaggtgtgaacactggcaagagtggtttattgggccaccaaggaacactaccacatgaaccaagtctctttctgaaagggaaaaagaaagataacttttttattctgtttgttttttattgtctaatcctactgaccgattcattttgtaatgcagtggtgtatttctttttttttaaacccttttttttttttctaatttttttaaattttattattattatgctttaagttttagggtacatgtgcacaacatgcaggtttgttacctgcagtggtgtatttctaacttttgctataactccattcaaatagcagtataaaattaatataatttttcaaattcagttgaactgtactcatcttgatacggatcataaatacagatttgggagtgaagaaagtagaacaatgaatactttatggcaggggtctccagccactgggccgtggaccggtactggtctgtggcctgttaggaattggactgcaccccatgaggtgagctttgggcaagcgatcatttctgcctgagctctgcctcctgtcagatcagtggcggcatttgattctcataggagcgcgaaccctgttgtgaactgcacatgtgagggatctaggttgcatgctccttatgagaatctaactgatgatctgaagtagaagagtttcattctgaaaccatttcccacctcctcctgtccgtggaaaaattgtcttccacaaaagtagtccctggtgccaaaaaggttatgggatactcagctccacgttgcacctaaagtagcaaaagactagataaaaaccctgaatatgtacttgtgaaatcctgaatatgtacttcgtgaaatcagtgacataaacctcctcctgggttacgtgttacagttcacaaacgatctcaagtattctacagttcacctgtggttgtcctttgtacaggtggaagaagagagggatctcagattccctgtagttgcgtccccgcccccagacagatctctcccttcttcatgccctggattgtttcatccatttaaatagttctcttcttgattctgacttgagggatgggcatcctgtgattaggtttggatgtgacagtggaagtttgtcagaaacattttggctcatgggccagatacattggagtccgtccgaaagctcactaggaaatgtagattctcaggtttaacctaactaggctaactatacctaagtatcttagcagaggtttggatgttacagagtttgaagatcgcatttttaggccctgtattcttattctctgtaaggatgatgtcgcccttcaagggtgtaaggattgttattggggagtatatattcagggcagcttgaatctgtgctcccgctcctcacctcattgttcttcggagggggatggaaaatcttagatgttaatcatggtttgtggccctccagaagttaatcttacctgacaaaaccttattccttaatgtttaatttcccttgttaagaatacatttaatttattgaattaaatttaaattaaatttctctcctggggatgggatactcaaaaaaaggttgagaaacataatcctataagaattactctggcatagtacctgccctgcattatctgtgtcccctctcccatctttggaaaccttaggatgtgattttggctatattattttaatactaagattttacttacatttaatggattaaaaagaaaaacattctagatgggtggaaacatttactctgtgaaattttgcatccaagtcaattggtttttatccttgtgaataaagccctgttaggatagactctgttctgggatttggaaaccttttgtcttcataatggcactgtatactgaaaactcttcatgttttccaccttgttaacatatgacaagccagggcttttatatgccacacaaaacataggagatgttctctcagggacatgttcttaagtcattgctgtctttcctcctgggagtgattcctggccccatgtatctgttttctgtgtagtgcagggccagtaggtgaagtgggtggaccacaggtccctgtgcccttgtcctctaggaaggagaaggggtataggaggcatattgttatctgggtttattggtttgtggctttggacttggtataaatgaaaacgcctctttttttttttaggttggggatggagggcagtagtgggagaagtagaatagggtttctaatatattaccctctttaaagaaaattttcaaaatgagttatttttctgtcatttaaggtaatgttaacttctttgtatttgtccgttttctgtgtaatttgtccaggctcaggagagttaaaggcatagtatagccagaaaactgaagtcctctggaaatctccattcacctgaaaatacattgcttggcaattgatagatgctggggtaaattattttttgagtcagtgaattaaattaatccaaagtttttttgtttttttttttaagtgtaattccctgttctatgattttagaatctagtccgtagcgtaatattgagggaaaagtgaactaggaagttaagagacctggcatcaactattcttactacctaccatgttttaaaatttccataggcttaactttcattgtttataaacttgaagaattggtagacgaccctttgagagcccttcagggtgcagaattttatcatcaagtatggtgaacacattagaatgtcctcaactgatgtagttgtgagaaggaattagttccatttatcatgtagagagtagtgaattagggtaaacagttgagccactctaacagttccagcaatttgatggctctaagagcatggaatcatctggaggtgagtgcctaggttggtggcggtgactgcctcacgtggtcatctggagtcatgcatttttttccgtcttgttcctctgctctgccctagggtatagtcctcgtgtgttgtctctgtactagctcagaagatgcagagtaggaggtgcagagacagaatagaaatgctcactcagtgtcctaaggcccagaagtggcacttgttttcacattctttccatgcgaacttagccacatggccatacccagccacaagggagcctgggaggtataacctagttgggccgtcatgtgctgggctaccattactatggaagatgatgactggagtctctgccacaactagtatatatgaagctatttcttagtatatttctggggaccctttttcctcatttttgtttagcaaagaattaatgtaattaatggaaaaagtaaattatttgggcaagttgtgctaagggtagtatattgaaagacaagttttgaaattaattagaaacctaaaactaaccagccctgattatacctttgtctcctctaattaaaagtccagtgaagagtagttagaagtttgctacactctggtttcttaggagcacttaagtacacatttagtcacaagggacatctcttttccagagcaggaacctatagttctcttcagtaaactagtcctataaaaggaagctgctgcttgaatatcaccaggcctcttgggctccaaattcttaatctaaatacccaaagttggccatgtttcagaattgcctggggtccttgttcaaaatataggttcaggccttaccctctggagattctgatggttgtgtttctgaatctgaattttttaacaagcccctcagggtgattgtgatgcagctgtcagtggtatgggatccagtaccttagccatctgtgccccaatcgccttacatgtgaaagtgcgtaattaatacttgcctggctcctgtaccacacaggattcagagagcatgagatgagttgtatttcaaattatttcataaatttaaaagtaccgtaaaagactgggcacagtggctcacacctgtaatcccagcaaactttggggggctgaggcaggaagattgcttgaagtttgagagcagcctgggaacatagcaagacctcatctcttaaaaaaaaaatatatatatatatttatatttatatatttttgtatattttatatttatatatgtgtatatatatatatttttttaccctgcagtgtacacacacacacatacacacacacaaaatagttagcctggcacagtggcaggcacctgtaatcctagctactctggaggtgggaggattgcttgagtccagtcttgagtccagggctgcagtatggtaggattgcacctctgccttccagcctgggtgacagagtgagatcctgtctcttaaaaaaaaaaaaataaaagtgccgtaaaaatttttaggtggtattacaagttgtttggcaagattttgtgtacaacagccctgaaaggtaagtgctattatctccatttaggaataaactgggaaataataggtaaaaccctaggcttcttgattttgcgtaattaaacagactcagaaaaagttatctgtcctgtgtaactgccaatagcagaacaaactgaataatttatagatacttttgtttttacatagtttataaaataccaaatgacaacttgatgcctttggtgtcctatgtggaagactctgctttgtactttggcgatgtcaagttgaatgagacacattgtctgcccgtatggaagttacagtccagtagaggagagaagacttaaaaactattcattataatgtccttaagaatcattttctttttatgaatgagccctacaaccataacaggacaggttgtgaatatattgtacaagttcagaggaacggagaggccacgtgaggtgatccttttgtaaaaagcacagcttgagacaggaggagaaactttttttttttttttttttaaaccgcagagagaacagtgtcggttgctcagaggactcttctttctaccctggtgcatttactaggaccttgtaggcaaataaaatgatagagaaacttgcatagatgaaggatgtgtcccattccctgaagtcaagggaagcagagctaagattggttatgcagaccatgggctaggcactccctacaaagtcactttaatcattcccaacagtcttgtgagtagagagagcagagccctttagtggaaagagcatgagatttttaaaacctagaagtggttggcaatggtggggccaaatctggattgtgtgtggatattcaaataagtggattttccttttttataagacccataagactcttcctcctttttcagcacatttggtttgccttgattttgacaagagtgtgattgctgctaccccattatgaaattggggatagagatctgtggattcattgtcaaggtggaggatgcaggcagggaaagagtgcgggaaccattcctgcagagtttgtggtaggggacctttacaggaaatgtaaaggttaatttatttggcaaagattgtaccagatgtttggggtaaagtagtgaaaaaaagacaaatacagtttgtactttcatgttgttgacagttttggtgtggcattttaacatttactgttcttaatagaatatgtgacaactttctagacaggtactactgtttaggattgggtagctcagtgttgggtttcactgagcatgagaggcgtggagagtttacattacatgtcttccagtggttctgtctttctaaagcttgaaggtactcacgagaaagcagtgagactgtacatcattccaaatgagatgttgatgtagattaagcacagtttttcatcccagaatgcaaattaagaatacaaacacaggttgaagcatttttcataggtgacatttgtagaatgtatatattttaagaacatttggaaaactttttttaacctacttgtattagttccctgtggctcctgtaacaaatcacagatttagtgacttaaaacaacagaaatttattctcttacagttctggaggctagaagtccaaaatcagaatcattgagcctaaaccaaggtgttggcagggccagggctgtgctttaggaggctgtaggagagagccacttgctagtggctgccagtacttcttgacttgtggatgccagcattacttgacttgtggccacattacctcaatctctcctgcgatggttgtgttgtcttctttttgtgtcagattgccccctccctctctcaacatttgtgatggcatttagggcccaccttgatgatgaaggataatcccctcatctcaagattctcaacttaatcacacctgcaaagacctgtttttcccccaaatcataaaacatttataggtttcacagtgtaggatgtagatatcttttggtggaccattttccagcttatcacactcctataaattatttggaaaagtaggaaggttgcttttgaagtagcaacttgtagatatatcataagtatacttccagctataataagaattagtcatagttttataactttttagtgttaacttgatgatccaaatttgagatccaacctgggagacagctcccaaaattttaccacctaatctgttttttataacaatggttttgagcgacttttctctaaataatggaagttattgttcttttagggtcagtgtaagctgacagtggtaatttttatcaagtattaaaaatgagtctgagtttagggaaatgatatgaatgattggaatttattttagcatctaggaattttattgactgagaaagtgcagattgcagaagagtagccaaaaatatactatgattgtaccctttctaaagttgcttggttaaatcaaggttgaaaataggggccaggtgcagtggctcacgcctgtaatcccagcactttgggaggctgaggtgggcggatcacttgaggtcaggagttcaagacagcctggccaacatgatgagaccctgtctctactaaaaatacaaaaattgtccaggtgtggtggtgcacacttgtagtcccagctacttgggaggctgaggcgggagaattgcttgaagccgagaggtggaggttgtagtgagctgagatcgtgccactgcactccagcttgggcgacagaacgagattctgtctcaaaaaaaaaggaaagaaaataggttataattggactatatttttcttattgtgctatattaggtagttaattttggactggtctaatatagcccattgtgaataaaatataagcatatgtagtgtttaaaaaaaagatgttcacacttagaaaggtgccagtggaaagttttcatggtcatgagccaatcatgaacataaacgtgtgtattaattttaatatttgattttttttcttgaacctgcctgttttttaccttttacaaaatactttttatttctctacaccttaagatacgtattttgaagtttttcagatagtcttgttatttctagttcctttttttttttttttgggagacagagtttcgctcttgttgcccaggctggagtgcaatggtaccatctcggctcactgcaacctgcgcctcctgggttcaagcaattctcctttctcaccctcctgtgtagctggaattacaggcgtgccccaccacacctggctaatttttgtattattagtagagacagggtttcaccatgttggccaggctggtctcgaactcctgacctcaggtgatccacccaccttagcctcccaaagcactgggattacagatgtgagtcaccacgcccagccaattctagttcttttggtgtgaaatttggtttctcttttgtaatgaaaggttctttgtatctttcgcaattactgtgtataagctcttcttcacatgaactttggaaggtgttctacattttgagggatatacacattacatattttcaaatatttagagttaatattgttgcaactcctacttcacactgacaatttccacttcccacttcccattccccagttgccaaatgtagtagccataaagagcatcagattgatttatctgccatccctttgtgcaattgctgccatgtttttactcctacttatattatacattatgtacaattttattatttttgctttaagctgtattttaaacaactaaaatttatttttgtttaaaactctcagtttttaaatataagtatccaaaggaaaaatatttatgaaaactttgtttccatttggtatcagttttctgtcttaacactcttcggcatttcttgtgcagctctgctggcaaggacttctctcactttttttcccttcttacaaattttaatctctaaatgtctgtattcagtcttgagtttgaaggttttttcactgaatgtagaattctagattgatactttttgtcttttagcactttaatggtgttccattgtcttctggcttccattgtttgtgatgagatgtaagtggtaatgactatctttattccctcgatataccagtcttttcttctggctgctttcaagattttctatttctctgctttaagctgttttactctgctgtgcctgggtatggttatcatttgaaagattttaagctatggtttcttcagatatttatccctttttttttctgtgactttatttacttgcattatacaacttgatattgttccacaggtcactaagggtctgttcagttttctttagtcttttttctctctcttctttagacaattttctttccctttctctttccctttccttttcttttttgagacagagtcttactctgttgcccaggctggagtgcaatggtgccatctcggctcactgcaacctctgcctcccaggttcaagtgattctcatgccttagcctcccaagtagctgggatttacaggtatgcaccactatgcctgcctaatttttgtatttttagtagagatgggttttcaccatgttggacaggctggtcttgaactcttgacctcaggtgatctgccccccctcagcctcccaaagtgctgggattacaagcgtgagccactgtccctggcctagattagatagtttctattgatctgtcttccaagtttgctgattttttttccctaccatcttcaatatgctgtttaatttcatctagtaaattttgccctttggttattatgttattcatttttagagttttctttttgttcttttttttataatttttatttttctgctgagatcccctatctgttcacacattaaagaccatgtgttcctttaagattttgaaaataattctaattctttgaatgtataaaatagctgctttaaaatctttgctgctaaatttaacatctgttctaacatggggttggtgttttactgactcctttttcccccttattggatcacatttttctgtttctttgctgcctactaattatttttgtattaaaaaacaacaacagaggcaaggtcttgttctgtcacccagtctggagtgcagtggtgcagtggtgcagtggtgcagtcatagttcactgctacctcacactgctgggctcaagtggtcctcccacttcagcctcctgaataactgggactacaggtgtgccccactatgctcagctaattaaaaaaaaaaaaaaatatatatatatatatgtgtgtgtgtgtgtgtgtgtgtgtgtgtgtgtgtgttcaccaggctggtgttgaactccttgcctcaagccatcctgccttagcctcccaaaccatgcctggcatgcttcccttggaacttttgatgaatactgtttttttttttttcttctcctaagaaggttgatttttgttctaaagtctggttggtcaccttgaacttgtgtaggcttggttttatactttattaaggcaaaatttatttaccttaggtaacctcaaggtgattccttaccctgtctaatatggtggaccatgactttcaaactgggttttcctgtgactcttgtctggattttgttttagacattattggtactggtttggagtaggctgtatgctagagtgtggttcttagtcttgaaggaggaagggaatgttcaggtgtgtattagggttctccagagacacagaaccaataagagatacacaggcgtgtatatatgtatgtatccataagtaaataaacaaatataaattgatgtaaggaattggctcacgtgacagtggaggctgagcagtcataagatgcacatacccagaataatgcttgaccaaatgtgtgggcaccctgtggcctaggcaggttgacacataaagttaactatcacaaggtgttaatgagatttcttgtctgtggctgggtagggaccccagatcccccagacttgctcattgtctatcattttggttctggtctcagcctctaagtaatcattctgtggctcaggttgtttcacctggcccatgtgcattctggtcctcatggctctcctacatccagacttctggaggtccccttctgtgcacctcccttctctctggcacatggtttcagatgcctgaactctaagctttaccaagctttaccttcacatctcagcatgcccgccatgctttactgagcctctagttcgtttcaccatgttgggaaattgttcccagacaaccaggagactcatgacccttcagggatcacagtcttgggctaccatttgttgattgtcagaaaacagttggcgcaaatattttcttcagttttgtggttgtttaaagtggaaatagcagtactagttattttcttgtacagaagcaggatatgtgaggattactgtttaatagccgttaggcatacaggttctttgcaggtgcttggaggaatgtaaggattaatacagtcagtttcctattgagcatggctggggtgggattgtgtagtggaatgtatggatttagaatggttcagtataagcaagtatccagcgtcatgattccagaatacagttttgctcttacggcatgtacattctcagaaagtacagaatctaaggatgaaaaaacaagctgagtggtggagacagttttcttttacattttagctgttcctctgattatatttcatggggtaggtagatacttaaatgattttttagtgatgtcggcctttgggtgaagatgaggcccactgagaggactctagagcagttgaaccccgcttcccacctagggttggaatcatggcccaggcagatgctgtgggtcccaagctctgcaggaatgactgggggctgccattcataaagcagctgtcccattattggatgtttttgttcttttatctattttctgcctagtctcctgcatccttttcctaattcttggctttagttctgttttcttcaactatagggagcgagtcaagtcatcccacctctgtgagacttgcttgattatttgcaggcatctatgcatgactccttccgtctttcattgtcttgactgcacagccttagtacctccagatccccacccacctattactttctcaggagttttgaactttctcactaacttttttaatgtggatctaggattgaaaagaatcgtgagcttaggaagcgttacagatacaaagactacaaattcaggtctcacttgtcaaatatcagaaaggttatttctgacagtcctccttccccaaatctaaatgtttccctcttttagcaatctttccctccctcataactttagcatggtgtatggtgtgtgcgtagtcatacattagtgtgatttttgtctgttttgaacactatactgtgaagtccacgaggtagaggcacagtgacagcaagcctcactctacatcttcagtgctggacgtcatccagtgtcatggcatcatgtgatttttagggtactattcatgtgtgttcagttatgtaaacttgtttctcagttgtatcaataggcgtaaataagttctcattgttgatgttattgaagtgtatccataagtatgtatggtcattcctctttttttttttaaggatgatacatatatttatttcttaaaaatttcaggggacgtcccagtgttagccacttcttgtcccttctgtggctacatccagttgtaattgttcagtacaacacatcaggtgtttgaaatgcctcaaatgtcaagaaacactaacttatctctggcataccgtactttttaaagcagaagtattttctgtaatggttactacagagtgtttactggttaatttttagttaaccagaagcatacattccatagctattccagttaactgaggtttatatccataaagacattaccagagatagaaaaatttcccttttcttcagctagagaccccaggcaccaacacaccctcaccaccttcttgaaaatataaagtgatgggacagggtgcggtggctcaagtctgtaatcctagtgctttgggaggctgaggcagatggatcacttgagaccaggagtttgagaccagtgtggtgaacatggtgaaacccttctgtactaaaaatacaaaaactagccaggtgtggtggcacatgcctataatctgtaatcccagcgacttgagtggctgaggcatgagaattgcttgaacccgggaggcagatgttatagtgagctgagatcatgccacagcactccagcctgggatacagagtgagactcttgtctccaaaaatgaaaaaaaaaattatatctatgtatatctctatatatctctatatatctatatatgtatatatctctatatacatctctatatatgtatataattatatatatctatttatatatgtaattatatatatatatctttagtagtgacttttactagtgaaaattttaatatcctaattaccgttatttagaaaaaattctttttgagttgatgtttaaaattcttttgattttttttttttttttaaagtcatcttttacaactcctccctaccgctcctcccctagctctccaggcccattgccctgactagtaaaggtttgctgttttttcttctggacattttcctttgcgtcttcatttatatataagtgctcatattcttgttatacacagatatatttacaaacgtaggttgggtatccctaattcgaagtgtttgggagtacaactgtttcggattttgaaatatttgcatatatgtagtgagatatgttggggatgggacctaagactaaacattcatttatgttttatatactgtagacagcctgaaggtaattttatacaatattttcagtaattttgtgcacacaataaagttttggctgagctgtggctgtaacccatcatatgagttcaggtgtggagtttttcactggtggcatcatgtctgtgctcaatagatttaaaattttggagcattttggagttttgtattacagatgctcaacctgcacttctgtaacagagtagtttgaatgcttaattaaaatggcagttgaatattatgttaactttggttttatgattaaaccttttcaaagtttttgttactttcagatactcataagtaaggcatataacctctctagacctcactttccacatttgataaaggaacgatttgaattaaatgaaattgaaaatctcttagctctaagtataacaaattatgtgttaaattgtataattcatctcttagatatcatgaagaatgtgttgtttataatatgaaaaagtatgaagataaaaatcaaatatgactttgggtagcaagaagagattttgggggaagttgctaatgtgtacagttttttcccctaagagcggcgagagaatggcagctgatcagactggtggtggaatctgtctctattgcccagcttggcactatgaagtttgacctgtgtcgatcactcaaaactagctgatgacatctgaaagggagttttaccccggctccctgaagtttcacattacagctctacatttgtgttaacacaatgaatgcttcaaaaaaaaaaagttatagaaatcaaagcttacataggcaaatctttgttagtgacttagttaaaaacatttcatgaataatagttgctcaagctattttaacccttttccctttcccagaagagaaacaagaaaatcccacacattttgctcagtcatggtatgtttgtaagctctcttgtcagaaagtgtcactgattctttaaatttcttttagttagctgcttttgtccagtagctcacttattttgtggtttgaagatgactgtacttctgacacttttctcacatactcctgctttaatttttcgaaaaactcaatggcaagaaactgaaaacatatacagaagtggagagaatactagaatgagctctcacgtccctagcctcttggcttcagcagtactcagtgttttgcccatcagattttctaatgcttttagtgtaagtaatgccacatttaaaaatactccttttagaaaagagacttagtatttaaaaggaaataaaccagagtcattcccaagatttatctgattaaactgtagagtttataattatataaattttttttagcacatagaacagtcattctctatagcaaaagtactagcttttgtgccctttgcattggattgagttatagagctaaaccacagcaaactcatttgttccactcttaggttgcaagtatcacttaactgtgcttacttatctcatcttcaatatttacaaattttaactcacatttgtttcagtaaagcaacccaaagtagatgttttaggagatgagttggtttgatggttatgattttcttttactcctgtattgacagtcagctgtagttgagactattagccttctggagggtgaggtgaacagggctttttccacttcaggggctagaggctgacatgcatgcagttacctgcagttcagggcagagtggggttagggtggtaatggtggcataaatactgttgtgccagggtcatgtctataggtgtgtggtgggaagctctgggggagacagcactggcattgggtttggacgtggcatttacgggcagaggtggataaagaagacccatggagtagccttagcaaaagagtggtatttgggtagtaggactttgttcatgtggctggagtgtagatgtgtactaggagatagagtgaaaaggtggaggtaatagtaatttaaaatataacagtaaaaagaagcagctgtgtattgatcacttactgtgcactgttttaaatggtttacaggtgccacatctttgataatacagcaattctgtgggtgcaataagtgatggagccaggagttcacctggggcaggctggctccggagcatcactggtgccttagggcctcaaataccagattcagcaacgctaagcacttttttgggtcttatttttggatggtgatagttagcaggatattaactgatttttaaaaacaaatatatttgtccattgtcatgaactttttaactctgttggagtttaaaaaattggaagtacttagtggttactcattgtggcccctagttacagttcatgaaagggattttttaatgttaagatggaagctgaatttcttggaccatttttttcctcataaaagatgtatatatttataaaaattgcgatacattgagaagtataataaattagtaattactcagaattttattggccaaagatattcattatgaataatcttaaatgctttcttcgagtgttttctatgtatttattctactcttctaaaactgtgctttgggaagggctttgagtcctttctaatataatggtataacttcccccctcatgcagtgaagctttcagaagaattcaagtgatcacacaacatcatatctgtgttaccttttgtgttgaacatttattatttataacatttaatttttaatgataaacttttgtatatacattttgtatattctgttatgaaacggatttctaaaattagagattgaacatgaagcagaatggcctacaaaaggaacatgaatctgtgctacagatataaaaactattttgaaggctataggaacaaccacatttgccaggactcatgcttaaatagactgtgtacggctgtggagatcataaattgagaaagcatgatatttgagcaagaaaaatttactgaggtttgttaagatttgagaagagagatggaaaatcttcctgttcagttggagaagaagctgaggaataagtctttgtgcatatgaagagtgttttgtaggctgtgtataggtattttctgtttcttcagaatgtagcaaaaaacagtgtgaacttaagttggtatagaggaatttaggagataatttatgactagggattggaagctattgaaatagtttatcatgacaattctttgaaatggatgagttttcattatatttaggattttattctccttaaggagaggaggggttaagatggtgtcttacaggtatttctagaactttattcccaagatttatttatttacttagagacactttcactttgtcacccaggctgaagtgcagtggcacgatcataggtggtcactacagtctcagattcctgggcttaagcagtcttcccacctcagcctccccagtagctgggattacaggtaagtgccaccatactcggctcattttgatgttaattccagttttctcacctattgcacgtctcctggacttacacagaaaatagaagacagttggctgggcactgtggctcacgcctgtaatctcagtactctgggaggtcacagtgggcagatcacttgaggacaagagttcgggaccaacctgactatcacagtgaaactctgtctctactaaaaatagaaaaaattatctgggcatggtggcgcccacttgtaatcccagttactagggatgccgaggcatgagaattgcttgagcctgagaggcggaagttttagcgagctgagattgtgccactgcactccagcctgggcgacagagtgagattctgtctttaaaaaaaaaaaaaaaaaaaaaaaaaagcccaggcgtggtggctcacacctgtaatcccagcattttgggaggccgaggtgggtagatcatgaggtcaggagttcgagaccagctgaccaacatggtgaaaccctgtctctactaaaaatacaaaaaattagccaggcgtgatggtgtgtgcatataatcccagctactcaggcggctgaggcaggagaaatgcttgaacccaggaggcggaggttgcagtgagctgagatcacgccattgcactccagcctgagtgacatagtgagactctgtctcccccccaaccccctcccccccaaaaaatgacagttatactacatgaaggtttgtagttttgactgaaaggacaaaccaaaacaagaaaaccccacctataatgcaggtagagtaatagcatgctcatgtataattgatttggcaagtctgtgaatgaagtcccagaaattgtatattcagtttagtgaggccaatggaatttgaagtacaggtgtagaaatgttgacattaacaaatgtcatatgtattaggattgtgacagtgtgactactgacatggtagtgtgccagtcatttttatagaatgtctattggttgagaaaattccagggtaacaattttaaggtttaagttttaatttcatcacaaaatacacattcattttagaaaatttagagaatacagataagaatgacaattccctgcagtttctctcttctgagataactattatttgcattttgtatgtaatccaccagtttttttcctgcacataactactattctctttttgaaaaacaaatacaatcatgttatctgcatattgctttacaacccactttttctacatgaagcaatattttcattgtattccgctgtgccaatctgtttattgaacatgtactgcgatacagaaatacgagatctagtggtacttttcaccaagtagtagataataccactggagtgagtatataacataaataattaacagaatatagcaggagataaatgcaagttaagaggagaggctggagtgactttaaagtggatgaaggcaaattgaggtgatcttgaaaatggataggcaagaaggggcaaatttcaggtagaagaaataaacactaatgcagaaggggcttaaatgcactttatggaatgtcacattgaactgtgagttcagaggaataagataagatcatacgtttctaaattatagaggggttaaatccaggttgaaagttctgtgtctcagaaaagtatgtgtagcagctttatgcaaaataaattagggcagcggatacagctttttaagcacagtagttcccaaacttcgctgggtccaggattcatctgtaacatcttgttaaaacaaaacacatattcttaggtccttgtccaggcttcctgaatcaggatttttgggagtagagtctgatgtagtttagggaacctgccctagagtttatgacataaccatcaggcctaggagatagttaattctaggaagcatttgtaatacttaaggtgaattaaggacttggttcaggtgactaaagtgagcatggagaggaatggaaaggcatgaggcacttcgaaaatggataggatttagtaagaccatttagataaagtcagcagcttctaatgaaattactgaaagaatggtggtgcgggaatagagatgggaagttcaagtggataacatgtggtgcaggaatgtgatgaggagttgtaggcatagagaatggaggcagggatgtggcactgtaggcagccacccaacagcttgttagactagatattgagtgaaaagtttgagtggagaagagagtttgaagtattagtttggagtaaaccattgaaaatacttcttttgcagggaaagatgtatagagaaatgagtgaagcggtcaggggatagaaccagaggtcacatctgaggttagggctaaatgtgaaagagacatggattatttggaggatagctagtgttgtgaaatacaagaacatacattttaagaatttttaagggggtagcatttctctgtaaactccacagaagtgtgggaggggaagtaagtaaaactgaactcactttactgcttttagtaatagactcattggaagaaaatgtaagctattcatgcagtgtgtgtttttgattatttctgggccttgttatttttctgtgtttctgagatgcaaggattatttaaaggcaatggtttataaaatgatatataattacatacgtataaaagtacatataaccaactaagtatatgtatgcatgcactcatgcaaatcaattatatatttacattttatatataaattatatatgtgtgtatatattgtattatagaacatcctgtgtggaaaagttggtgctgtcagaagggagagagagcaaggcagttttccagtgcatttcttataagctagttatgagaagggcttgcaggttactgattgaacatattctttctaaatgtcttctgtctgatagatactcctttgttagggaatatatacataaatgagattaccctagatgttcaggttagtgagggaaacgttacaatagatagcactaagcgctggatctcagctttgattcccagagcacctagagcgtcattgggccacctcttctaagttcctcttaagatctagaattgatttgaataatagaaattttgagtacattttgtgtaggtgacataaaagaacatccttaagcaagcatatcagttaaaggacttgtcttcatggctcttggtgttttcttcataccactttgctcttagttcctgttagcagaggggaagaagcaggctctaagatttaaaattcatgctagtgaaaattagaaacaagccacataccctcaataggtgtttgcttaaaatgcatttacgtctttgcagtggagtactgtgcacctggtaaaatgatgatgcaaatataaattgttgatataaagatatatatgtatatatacatatatttaaggagcagagattccaacaccaaattttgggtggtggaattttattaggttggtgcaaaggtaatacagtttttgcccttgggagattgggctgatggtgacacccgttacccaagactgagaatacagaaaggagaagtggattttttctctgtttttcctccctttttgagtaggggaaatggtagattcagtttaatatggccaaaagcagtggcttagtagtcagtttgcttggatttgaatatctctctaccattagtcgtgtgtgatttgggatggtttcacttcacctctctgtgccttagttttctcacctggacaatgggaatgatagtggtacttactttttgtaattatggggtttagtggtttaaagtagaaaatttataccagggcccattaaagataagtcatctcatgcagtgaaacataactgggactttcgagctcagttcactgaggtcttctgggcctggaacaagcccgccttataaaagttggctttacatactacatactaaaggagttcttaatgtagacttttaaccaactgtcttagaaatgagcctttggaacctaggtctgcatgtgataggggtgctttctagtgtctacttgatagaccagtcactttctagtagtgggagttaggttcccgaaaagctctgtggtttgagaattcatttttgagaatatctattcacaagagaatagataaacagttgatagacttgaaggtcatacaaacctgtgcaaatcattgtaaatgttttcacattctaaaggaagacagaggacagcaagcaaaatagaatatcagtggtagtttacatattttgagttagtaacagagtacctgtactactactttacaattactgatgataacttacccccagaaacttctgtttctccccttcagttttagaaatgatgtgtcagtgcattatgtattgttgcaggtaatgtgcatatgaggcatttccctcctgttttcctctatttgttggtacgtccaaatactcagtgcctgattttgtctttcaggcccagatgtgctctcagagatactgagttgatggttgagatagccaaaatttggggcaaaactcatttaatctgctcagcttttagttcttaaaccttctccctagttcttttcacataattgcatgagaaagcacatgcttctagcctctttaacacaaatttcagctattccacttccaaaatgccattggagtagtataatccagcacccatgtttataatcccacatgttctttgaccttgaccaaggttttaatgcaaaattgactcatctgctattggtttttaccttcctttcagtttgtctcctttaatatatatatgttttttttctttttgagacaggatctcaccctgttgcccaggctggagtgcagtggcatgatcagggctcactgcagccttgacttcctggaatcaggtgatcctcccacgttagcctccttattagctgggactacaggctgcaccaccacacccaaccaagttttttattttttggggtagagatggggttttgccatgttgcccaggctggtctccaactcctggtctcaagcgatctacctccctctgcctcccaaagttctgggattacaggcatgagctgctgtgcctggcctaaaatgtttttggtaaagggaaaatatagcaatctgttatatgctggaatcaaaatttttctactagatgaacttttggggaaatttagtattctgttctaaattaaatgcctttttcaagtaattactgctaatgagctcttgttttttcatgtttagggtggttgatgcagagtagtgcatataggggctaaaatcagacttagacacttgggggttcttgcatctctgtattttctcacaactatttcagtgattcttaatgagtggcatcttggcatagtgaactttaatgtgggaccatagttcacaaactgtgaccttaggccagttaatccttctgacccttgctttccctgttgatgaaatggaagtaacactacctactcgtagggctgtcaggaggtcaaatgtgtcaacgtctataaaatgccttagccaagtggttggcacatagatagtaagtgttccacaaatgttcatttccctgtagttttactaaccattttggtgcaatattatattctttataaagtcttgtgttttggccttttttttttttttttttttaaagactgtgactgttttctagggttttgaggggagtgataaatgttctgggtttttaggatttcacttgaaatcctcctatataactgctttttctctgtaatgctgcttgatcatcttattggaaataagagattttttttcttgtgtgttaggcatcaaaactgtgatacttctattttccctttgactcctttggctattataattctagaaaattatttctaaaattgctatatggaaaaagtactttcttctgtcacttctttaattcgttagtgtaaatgagccaaagtttataagagaatgttagttaactgtataaattttagataatgacataagtttaatttatgtaatctaattttagatctagtttttcttgatttctgttttgtagcttttctgttgttgcttatttttaatgggcatcttctgagttatctttttagatcccagtgtgcactgtattttatcttttcatatgggctaaattttgtaaattgtgaaatatgcgagcatttatataacatataaaatgaagtaataaaaaacaacttggtattttcttccagcttaagaaatgaggtagtacttaactagtacttttgaagctccttgtatcatactgattttttttcatctgctacttgtaatacttcatactactttagttattttgaaattagatataatttttagtttggtgtcattacaaaacactgtcacattagagaacatattgcacctgccatttagtttattagctcctgggttagtctgaacttgcctgtcatgctgatgcattcatttcagtcccagtcttacattctggatctctgtttattagtgtatatatatatatttttggagacagagtttccctcttgttgcccaggctggagtgcaatggcatgatctcggttcactgcagcctccgcctcctgatttcaagcaattcttctgcctcagcctcctgagtagctgggattacagggatgcgccaccacgcccagctaattttttttgtatttttagtggagatggggtttctccatgttgatcaggctggtcttgaactcccaacctcaggtgatacgcccacctcggcctcccaaagtgctgggattacagagccactgctcccggccttgtattttttatttttcttttctttttctttttctttttctttttttttttttttttttttttttacaaatcttggtgtatcagtgctttttattaggtgacttgatttctccccaacccctgcctgtggaatacagacaccaagagactaagctcagtacctatctgagcataccgtgtgtttaacagcctgtggaaactgtcctgtccctgaagatacgctgtagattaattttatgcagtgattttaagacaactaaaaaaaatggtttgtaagtttaacttcaaaaaaccatgtaagctcggttcctggattgttcgtagaccttcacattgcctttggcaaactgagctagaacatactgtagaagatttgagggtcatgagaggttcctgtggtaaagagagatgtttgtcattagcatttgattgttactccatagtttgtgaatggctccatttgtggggcagatgatgaaaaatatactctatatttttctcaaaaaaatgaaaatatgactgtctagatttttaagcttctttaagaagaaaatcgtatctgtagcttatctgcaaagcacatttggtgtgtggaattatctgcttattgtcatataaaaactctgaccttgtattaacatttttgtttttgaaaagtggctagcctgaaggaaggatatatggaataatcactagagtccttatttaaagtaatccaaggtgaagatttctggagtttattgttacttagcatatgatggtttggttgctgtataagtcagcagaaaattatgtaactcagagatactttaggtggcctttcatatgagtaatgattaatggataatgtttcaaaaaggtgtcagaaattttgatgtgtcttacctttagatttttaaaatagtaatgaaatctaatttctaacaatttttaataaagaatactgataattgattctactgtcttacaaagaacttttgtgtcagtaatatctacttctatcgaaactggcgaggtgtaagtagcattgtaacattttctgggtgaagaatatgatgttgagagcctaaaggatttgattatatagttcatagctagagattgaatttatgttttctttccccatagttcatgtcataattttaaagactgaccattttaggggaaaaattattagaaaatgatgtcctttgagtaaagataatcttgattcaattatttttacaaataaaactattctgatgcagcactctagtgttcatccatctagtcatacaccccccacaatatgataccagctagttgtaggtctagtgtttaatgtaataccgtaacaggcatttgaattggaatggtagttcttcaggaatggaatctggaatataggcaaagatttcagagacaattcctaatttaaaaataactcatattgtctctgaggttcttttccagtgaagtgtttagtattgctgctatttggagtacaaagttggagcttttaaagaacctgggagttcaaaagtataaggagaaataaatgaaaagcagaaatattttgaggcaataagtatagactcaaatctatattatgacccacttgtagcaccacttggaattctaccaataagagatttatttgggcaaactataatggttgttggaaattgcaaatcttagtgtgaattattttagtccagttggtttctttctttctcttacctgaaatgaactatactgaggcaataggagctttgtatagtaatttaggagtgtaaaacaacttagggaaaaggattattaagcaggatgattgggatgacatcatgtgaaatttaggaattggaggcattgggaattgagagggtgctaacaaaggaaaacagcttattttagaatttgtctggaggatgtagaattgaagaagttttggtatttcttctgcagcggccccagtgcccttgaccaggaacatctcttggagtcagtagttttcatgaggctgacctaggaacttggccaacatatgcaacattgttctatttaaaatattccttgaattaaattcgatagtatcaatttaaaacataaagttttcactcaactcctttagaagttagattttagcttgtacttgtctttacctcttctgctgattatcagttgacaacactgagattactttcattttcctgtaagtcattatgaatttttctggtcaaccatgagttatcagtggaagcaataagtaggaagtactgtaaaagaattacaataaaataagagaaaccacttggagagcaagagggcttgtggacttgggggagcggttgtgagaaatgtctcagaacttaatttacaaataacattggtagattgacatgttgtctttcctataaagtaactttacctctgtcttaatagtaaactactatgaaagtgaattcgtgttcctcttgatttgtgaactgatgaaaattacaaaatgtggagttttttccccagataaagtaaatggtggaatattcaggtttatttgatacctagaaaatacctgaaattttccgtggtaataggcacattttgaaactgttttttttttctctgacaattgaatatattttatatatagttgattttgattattgaagactaaggaaaatttaagtttgaatgttagaaaatgaattttgcaaatttgaagtaattttattctttatgttttgggattgtagttatgttagatattcctcagttggggtaattgtcttgcatcattatctcttatcataatctgtttttcttcacacagtgttatagttttgccgctggactcttccctcccttcccccaccccatcaggatgatatgagacttgaaagaagacgatgcatacaggtgactcaagttttgaaatacagtaaaactctggctaagagaatgtgggaatcgatggtctattttgaatgggggaggtttctgataaatagcagttagtggggggaattgtagatcagtaaatgcaaaggtagttgggctatttgttaaacttacttttgaactcagattgataatcagtgatttatagtggtgttattacaaatacagcatagtaaatgctagcacttaggcttttcaagagctaatattttggtgggaattggaataattctgttaatgtaaataacacagtcacctttatggttgaatgcatgtctcccccagaactctattagaatatggcagatcttttatgggagtagatgttagtaggatatcatcaaaaagactgacaagttaaggatattatacccatacatacggtttcttaaaaagatatgctctgggattttgtttattttttccttgttcccaatatccctgcctcccatttcctttcttcccaccctccccctcttatccttttgtcatttgtatttttatacagaagaagcagtgtgaaggcatttttgaaagaatattttttgattgctctataattaattgaggtgatcttttacatgggaaactggaggctattccacacatggctatgttcaaatttctgaaaatgtagtgcagctaatgtataaagtgttaataacttttgaacttaaatgttcttaaattaggcatattataaggcattttgttgaactaagtgacttaacatttgaaactctgtcagagagccttatttgattatatttataaactgtttgaaaatgtgattgctaactggaaaagaaatatttatataaattttgaattgatacctaacagatgcctaattatatcattggtgtagtttttgtgattggtttttatttttggcgatctgggttttgtctaggggaaaaatcatcattttatgattttaagattttaaaaaattgtttcggtgtactattttgtatgaagaaatgtgcttgaatatatttataaattaaattagagagtatataatacttcacgttcatgtagaagtcaccattttaagaccgatgttaattcttgtttacgtcaaaggtgattgagcaatcatctctgttacgcatctatcatgcatgcacacaggcttgcacatgtatgtttgcctgtacatattagaagtatgccaggtacacattctggctgagttgctcgctgattgttaaaagcaacgtgatgctgaagctgaatatcaccatcatagaaaaacaaataggcatatttacagaaacatttttagaattttatgcacatttttttgttgtcagattttataagtttgaccttttggtgcaggaactatttctcagcattgtcagctcctggattgctccttgggcgctatactgcacattggctataccaagtagatgctcactttcgactgaggtcagtagaggaacaaagtatttttggggtatctcatagatttatctatgaatattactgattttggagattttctctcgtgaaattttggagttacaaagtttctatttatcctcacaagacatggagggtttccaaatagctctttttcttgaaaggcttatggtctcaatggaatgaaataactaatgagtaaatacagtttatagttatctagttaattttatgaatgctagaacacaagaaaattctacagattagatttatgataaaatccaatctcttattcagccttgtattctttaaaaattgtcagcatttattggcttacagaggaaaaaacccaggaaagaagatctagctgtctaataaatatattagctgttggtgtattccctttctaatagtttgaaagttaacaattgtttttgaacataaaattaacagctttcagaatcatcattaattaatgtagcagtttggtcttgtattactatgcacacatttattcgactgatagaatttcaacacattaaaactaatgagtagatgttcaccgaaagttgtttctagagaatgcttcctgacatttgaaagcaagtggtctgctttctctgggccttgtttttaccctctggcattgttcatggtactggctttgttctgttggttagatgtggtaacttactctcatcttttccttgatgaggcacaggttcagggatgctggaaaggacactgaagtaggccttggctgatgggcctttcagaagtgaacacttaagagtaggttttcagagtaactttgtgaggtgatgaatatgttaattggcttgattgtggtgatcatttcattttgtatatgtgtatcaaaacatcatgttttacaccttaatatatacacaatttttattttccagttataactcaataaagctggtgggaggagagaaaaaaatagttttactgaacactaggccaaagtcagactttgatgtatttagttcatgtatctataggtgttcctgtacttacttaatttgagaatctttttgcatgttttaaaatacagttagaacatgaatgaagtacatttggattttcttttgatttttggaagaacaaatgatttgttaacaaacatttatttggtgagcatttgctttgtaccaggtactattataggtgctgctctgcatacaaggatccctgagcttatggataacaaataaatgaggcagtggaggtttttgataaagttttaagactcacctattgaattcaaggcatgcagagagaaagtagagagcactgtctgggtaatgacattgacagtaatggctttacctgtaggcagaggttaccaaaatctctgcatcccattcttctcttccgagctccacactcaggtaactgctttctggatgcctctcccgcatattccctcctcctcccccattcagtcctcttagtaatgagtgacaccattctaccctaacacaacatcatttggggaacctagcaaccactctttgcccttttgaatcacaagtaaccaaattcagtttatttaaggtgtagaatgacttctcagattagatttggaaaaagtactgcctcagagattaccatgtatatgaacataaagacttttatataaagaaacctgtgtaaaccagcatttcttcagtttatttgattaagggacctcccctcccttttatttttgatttatacctattaataacatcctgtggaccatgatttgggaaaatcatgttggaaatagaaggggctgccattctttgttttgttgaaatgaacttctttaacaactaaaattttttaaacaatagtgatatactagtcacttttaaatgtggaatagttccaaagcatacagagctatcactttttgaggatgaataaacatggaaatttatttttaaatgtgctgatttgttcatattgtctatgtcataattcttatgcatacactatatatatactcatatatatgaatttaagtacttaaaaccgtttgtggcagagttttaattttggattctcttaactcattttaaaatgtgaattttgtaggacaaaattttcatatttccagtgatcacaaatggggtgtattcattatacaagagttagaaatcagatctgtaaattacaaaaccccaacttttaaaatcccatcatatgtggggtacactaggagaatgaaagggcatgtagattgtaatatttaggaagctgtcaccagtttgcctccccttggaattgttgtcgtggtcgtgtgtgtctgatctttttctttgtctgtgtctccttctctagctttcgttcatgtctcaacccaagcagtttgacttttttcttactgattcaataaatttatttttctagtaagttaaaaagatagtggatttgcttttgcactcatgtttttactttttgtttattagatgatacaaaatcactgaaagaattctgaaatgtataaatatatatagataagtataaggaaacatatcccaagttttagtgtcccctacagtgtggcacattcccttccagttgtttttcatgccatttttttaactaattgaggtcattttgaatattcaggatgatgtggttgggtaagatccattttatactcgtgttgactaacatatcataaatgttgccctacatcatcaaaagctaaccatagtgatttgctgttactttgaacttggagcaaatccagggtactcagaatgcttttgaagataattactttagatatttattttacagtatgcttatttcctagttaagttaggtatctcttatttttaggcattaagttgttttttaaagcactaatacctgtgcatagtatttggctgtaaaattattttcttataattgattcctaggagtcataatgtttgaaaaattttcaggctcttgatgcaacttttcagaaagctgtttggtaatatgtaccactctgtacattacaagaatgtctcttaatttatttttctcagcattgagtattatagttaaaataaatcttcaacaggcaaaaagaagaatctcttattttggaacaaatgaagtagtattgtatacttggtggaggaaatataagtgctttagaaatgcataaagtaaaaagagacagccactccccttttcctaatagtttggagtctgtctttctagcgagtagtttttgtttaatacgtttatggcatttgcacatgttgtttaccagttttatgtccagctagtccgatagttcctgaaggtcagggggttaaggcttatcctctttgtgtgccctgtgactgtctggcaggatttctgggacacaggaagtgctcagcaaatgcaaaaagaataatttttggcatcctaatggcatttttaatgcctaaaaataagtatattaatgcttgctttaatacatttcttcaagtggttttaagagtttcttattattttccattgctttttatgtttcatagttttatttatgtttctaagtggaagcaattaataatgattacattatgtatgtgtcatatgaaaaagcatttgatatttatagaaaaaatgatgggaaatctgaggtaagccacattgtaaaattgaattttttaccttagtgtgtctatttaagacccaggtaaaagaaaatacatttatattcatgattttggattttaggtatacttattaagtgtaccttgaaagaatgtctaagttctaggaagatgacaacagaacatagttttaaaattttcccattttcctctagaagagacagagtaactagctcagcaaaaccaaaacgtcacattcagcatctgcaagactaggtgaacagtatccccactgactcacatacaagtaagtaggtgagagtgaatgttgatagcaagacctgtgtggtatcagcatttgtgcagaaggaggcatgagggtgtctgatggacctgagaataggagaaccctaagataaccaacagaggagactcactgcagtgagagacttgcggaaattatgtttgagaagagcagctggaactggagatagttttgagttccctggaggacacaataagttctgaaggggggttagagtcatgtggtccccatgaactctcaaaaccagtttaagctccattcccagtcaaagccctacaccaaggagacactgctggggatagaatccacattaaacaagatggagataatgagggcaaaggaaaaaatgtcagatgaaagtgggagaagataaaagcacaggagatcttattcatgagtctatattttgggatccttcatgaaaagggaagagaactcttattgaagtcagaaaagctactccagtttccccaaagttttttattttacataaaaacgagcagtggacagggatcatagtcaaaatccccacagagtttttataagagaaaagcataaggagccgaatattattactgcagacaatgaaagcatgccagaaagaaatgtccacaaaataaatgaaactataacttgtttcagaataatcccagagaaatttagaaaatgatacaaacactaaagcacaatgtaaatctgaataaggaaaaatcagaaaagtggtgataacccaggaaagagaagtaaaagataatttaaaaaatgaaacctaaacagagtgaaaaacacaatataaaatttctcaaaaaactgtttaagatgaataaccagccgggtgtggtggctcacgcctgtaatctcagcactttgggaggccgaggcgggcagatcacgaggtcaggagatcgagaccatcctggctaacatggtgaaaccccgtctctactaaaaatacaaaaaaaaaaaaaaaataagccaggtttggtggcgggcacctttagtcccagctacttgggaggcttaggcaggagaatggcatgaacctgggaggcggagcttgcagtgagccgagatagcgccactggactccagcttgggctaaagagcgagactcggttctaaaaaaaaaaaaaaaagagatgaataaccaagaagaaatgaagaaaaatgaagcattccagagaaagcgacagttactaaagacaggcaaggaagtttcaacatacaaataacaggaggctctgaagaagaactaaagcaatgaaacttaacagatactaacaatataactcaagaaaatttgttgaaatttgctttgcagattttttttaagagagtcttgctgtgttgcctaagctggaatgccatgtggcataagcatggctcactgcagccttgaactcctgggctaaagctatcctcctgcctcagcctcccaagtagctaggactgcaggcacgtgctgccacacctggctaacttctttatttttatttctgtagagatgtggtcttgctgtgttccctaggctggttttgaactgctgaagaccagccttaagtgattcttccgccttaacctcccaaagtgctgggattacaggtgtgagtcaccgtcttggcctttagtcactttttagtgtgcttttaaaatttaaacattctccagcatcaatattcttctatagtactgttttaaatgactaatcagtattctgcgaattagttaatgtttaacggttccccatttttgctaattagttcatgaacaatgtttaagtggatactattatcgtgttttttgtttgttttttatttattgccttaggttcaattcctagaagttggaattgttaaggtgaagcatatgtacattttaaagccttttgatacattattttcaaatacctttttaaagtacagtttatgcttctaccagctgcacatcagaatttttctgcaccctaggatcctaggtattttaaaatgtttgccaattcaatagacaaaacataactcaatatttacatttacatttgcttgaatattagaccgagtatgttttttggggggtttgttactcatgttttttgtgagtttccttttatcattctttgttgatatttctttggggttttaattttttttcttaatttaccaaagtttctcattgaacccttactagatgccaatgactattctaaattatttacaggtattaacttatttactcctaatgataactctggtacaggtactgtgattgacccagacagaggttcggtagcctgccccaggtcacacagctagtaagggatggagctggggagcaaattcagggcctgtgagtccctcctcttaatgatcatgcttttgattttagggatacttactgttacttattgctggtacattttccagtttgcatttgccttttgttcatggtgtcgttttatacaagagctttaactttttgtatgggagaactaagttttatttattagtgtaatgcctcaaacataacagattctcaaatctatgtgttgaacaaatgagaatgaacccatcagcagtctgttgatggtgatgaccttttatgtagtgtaatatgtatctccttttaaagggattcccagggcttcataaatgagttactctttggtttttatcaggcacagtaagcttatctgtattagctcttctggaaagttttttagatgtaatcactgcttttaaaaggaacatgtgttcttaaacaagcaaataggagttgtgaagaatgtatttattgataatgatttgaattgtagattcaaagtgaaatgaaataatttcactctaggaataatttgatgggatttgttttttgtatttttagaaaattatagatttggccattgtttaaaaagttttgaataaattttggcttagtgtaagaagattctttgataggaaaactaaaactatttgatataaaaagttatcattgcttaagatttggatagtgtagatcatctcctcaaaaggtgaaatttaagattttacttttctcgaattcctgacctcaggttatcctgctgccttgggctcccaaagtgctgggattacaggtatgagccaccgtgcccgaccaagattttacttttctttaagcactctttctcctcttctctctggtggtgaataccaggctacttaatggtgccttcttagtttggcctctgtattccttagtcttttaaaaaagtgtagagatccatattgctaatggatatacattagagagaaacacaaataagttaattttaatttttataaaccatccacaaaatatactccatggaatcagatactcaaaaagataccgagatgtaaatatttatgttgttaacgcaaatccaggtctgctttgtagaaggttaccaaagcttaaaaaccattgttgagtgcttgctgtttttgtaacctactggttgcagccagctctttcctctcctactggtggtagtagtattcttcaggccatttgtattagtctgttcttgcactgctataaaggaaacctaagactgggtcatttatgaagaaaagagttttaattggtacacggttccacaggttatacatgaagcatggctagggaggcctcaggaaacttagagtcatggtagagagtgaaggggaagcaggcatgtcttacatagccccagcaggaggaaaagagagaagtgggagtgctacacacttctagacaaccagatctcgcgagaacgtactcaccatcgtgagaatagcaagggggaggtgtgcccctgtgatccaatcacctttcaagaggcctctcctccaacattgagaattacagcttgacgtgagatttgtgtggggacacatatccaaaacataatcaccatgcttagccgatattgttaaattcagacttgttcttttaagcattaatcagtcaatttacatgcttatgttaataaaatttaatccattctggaagtaaaagaacgaaatgtcagttttccttttcctcgtttccacttacaggggtaaccccttttactattttccgttttaaaattcttctcttggttgcctccatgatttttaatacattagtatgtttgtagctgtgttttagtattttaaaaaactattgaaaaatgaaaccagatagctctcagtgctacctcttttccatccagtttctcccgatcctcttttaaagtttttctgttgattattattaaaattttataaaactaacttaaacctcattcttggccatcagttttagacagtttctcttgatttctcaagatttgaaatgagagctttagagccctttatatttctttttacctcacagctgttacccaccagttacttccagcttgtatataggtatgttcacttacacatctttctttcacttaattgaatcctttatttttgtcttagaatcttctgaatattgaaaacagagaactatactggaagaacatagtgtattaagactcatggagagggagatgtgatactgtgtcactgaggtcgttccagtcataggagaaatgttaccactggattgaggtctggtacattttaaaagatgatttaattctatgatatgtgttcaacttgcactaggatagtttttactttcacctttgttccatgcaccgcgcaaatacctgggaacccttgttgcccaactcaagagccagagtcctctgtcatcattttgcctctctcctaagtgacaggactgagtgcagacttggtgtttgtgggtgaggcatgtggactgacaggcaggcttcagtttatttagcgagtgtgagccctggcaggaagattctctttctctgcttgccaggttgaggaggcctcattaagcagtttgaacttgtggttttggcgtgtctagtcctggtgcaggtggcttggtatcctcacaggcatttctttggcctcacccttggggtgactgttcacttgtgtttgagcggctgggactcagtaggttcactggagtaggtatttctttagagccactggcggaggctgatcatgcggcagatagttgtttagtatcaagccagtctctccccttctttctactccagtttttctttaccacccagaatggcatctgccacttctgctctggttcctagatctttttgacattccttaaattattggtattatcccagttgccttttcttgcagaaaactgacaaaatctttggttcactggtatgtctccatcccatgctttattttatttagtgatctttcactgcttgtttctatggatgatatagaggaatatagaggataagaacaatatgtttactctatccagtgttctagattttcttgttagaagcaccctccttcccagcttgggaaaactgagctgctggggtggctgttggctccttcgcttgctgttagttttaaaggattgttttcagtcacacttgaattgtagctatccttggttctctttttaccaatgaattctggtagtatgttttaagagctgggtggccttcctggcctttgtaaacatttcctgcaatgcctagctttagtgagctgcgaagttgcccattggagatgaggctctattgaaagtcagcacctgtacttcactccctgccttttgtgactttgggtttcgaccgggtgtttggaagcactgtttcttctgtccttgaccttgttccacatgttttacccattacctcctgtgagcaggcacagggcctttccttgtcacctgggcttcagctgctttgaggatgactacttaccccttgcagtagcttcccaccaaggttcttgaaagggaagttttcataatgttcatttttttaaaaagttagaccagctataccccctaaacttaagtctgcttgttttcatatgacgtagaaattgatacaaaaatactttatgtagtttgtatagatgtagttgcttaagaaagatgacacttactgtactattttgttgtcttgataagtacagtacaaaaaccagtttttaaaccctaaagttaatttgcaagaaattgatacaaaaatactttatgtagtttgtatagatgaagttgctaagaaaggtgacacttactgtactattttgttgtctggataagtacagtacaaaaaccagtttttaaaccctaaagttaatttgcaagaatctttttgttttgacaatatactattataacttttagctgaataaaatcttaagtcaacttttatgttttcatgatacctaaatgagggagcaaaagtatatttagtatatgacagtatactgtcatatactactgaattttcataaggttctaggagcctttttttttgttctgggaaagggagggaggaagaggatggcactgttacccaaatgtgagttagttgattcagaagagtaaagaatagtccaatagtccagtagttaaaaatttatgtctgtaatccagatttaaataccagtttatcttctagctttataaacagtcttaatgagaagtaggggacaaaaaagaagcaggattgcccttaggttagagaatagaaatatctacttggcttaacgtttttatgaaagatgtccagcaaaactgtggtggcagcctcactttagagaatgaggtattaaaaacttgaccaaggtagtcatgccagacttttgaatatttttccaaataagatggcttcaaattgaaaaattttatccacttgatatttttcaaaactataaagctgtgttctatttctacctaaaatataaaattgttagtatggtatgatttgtcatttgagatgatcttggctaatacattactgggcataataatggctattacacattgagaggatagaggctgtttccgtgtctcaagcatcattaactgcagataaaaaaaagttaacagttattctaaaaatatttcttataggggagaaaatgtaatcagtatattgtatgttttagtctggtgtggtggtgcaagcttgtaatcccagctactcaggaggctgaggcaggagaatagcttgaacccaggaggcggaagttgcagtgagccgagatcgcgccattgcactccagcctgggcaaaagagcaaaactccatctaaaaaaaaaaaaaaaagttaatgattaattgtatacttagaaaacttactttctttactaggaattctaaatatatatatatatatatatatgtaatgaagattttagtttagtaagttaactattttaaaacatgtttaatgtttaatttctgattctaaaagtagtactttttggtactttcctaaactccataatttaagtaactttaaaaagaactgatgctaagctaaacatttaaattgaggattatcccagagcatctgtcactaggcagatgatgtttccttatgtctctagtccccaaaggaaagtaggagtgccaagtttttaatatttgtccctttcaagaaggggaaagttttgtgatacaaaaaatgtttaagaggtggaccaggaaacagtcccttgacatggaaaatgcccaggctgagttaggattgctttatctatatggagggaataagaacctgggagaacaaaccaaaatattaaagattcatgagtaagagtatgaatgaaattggctttaaaatctttcccttttatttctctcttacctttatccttcggaattaaaggaggctaatgcaggttccaagtagttcaaaaatgtaccaaaagttgtgaagtttaaagggctgagattgagtctttcagggaatggattaaatactttggtttcgacagtgattttcaaacctgtcttaagccttgactcgtagtgtgtagatgatagtatcgtgaatgatcctgagctaatctcatgaaagcttacatttaaacaaattttcatatggacaagaaaccaagagacattgatgtgtgactaaaatattgattattcatggattctgcgagagctttgctttttatctgtgggatcttacgcattatgtttctaaaaatatagtttctttgtttctaggatgggggggttaatattagattatttttaagtttccttctagttttagagttattgatcctttttctgacttttagaacctgacttttccagtcttggtttcattggactttaacgggttccagaattcctgagtagagagaacatgggaagaaattaagggacaggtgtgggtgatgggtgcttagagatggtggaaaagtggcttcaggagaagagaaattgtagtgttagggataggaccagcatgctcttctcttggaatctgatgcttgaaatctactctgtcttaatgaaatatactttacaaatgctagacgtctttctggagacgtttatagacactctatggaaaaatatctaaaaatcatgaaatttttcatgatgtggaatgaatctgtactctatttaggaggagataattgctaggctaggtgggacaagttgatctattttaaaataaaattgtatcttttataaggcacaaatgggaactgtgtctccttgacatgtttcaaagcatttctctgaatatgtgagattaaagaaactctcaaccactcagaattgtcagaacactgatgttctttaaaactatctttgtagctgttagtatgtactgacacagttgaagtttttaatgttttattcattattagacattttgcatatgaatgtaatgtcttttatttacagttacatcttaactgaacttggttcccagatatgagtattatttacttggtctcagtcttcatattttaagctctataggttaatacttaattgggttttattttaaaattatttttgaagctatatattaaagtttgtcgtaataaaccaaatgttagttttcctccacctgggaatacttgagacttcagtgagccacgctttctgttatgcccacctctttagtctttccattatagaataaacatgctttgtgtgatttctctaaaatgtaatgtttgagaatctattttaatgtatagaaagacatttacataatgcttttgagtaggtggggaaaaaagttgaaatgttgatggcagcatctgttagaaaaactcacatgtctatatagtaaaaagttaaaattacaacaaatgcactactttaactgtgttctgcatgttattccatgggatcgcctttggagtaaagtagaatatgtttctagtcttttatagttggtgttaattttgttctaaacgtgaaagtgttaacagcaagttgaaaatgtgacaaagctcaatttcatttcttgtttattgcttgttttcctattggacaattggaagtagctttgccctggcaactaaaataggctatttgcataacctagtttgattggctagcatcctgactaacagttccaatcatatggtgtcggtttagtggtaggctatgctaattagccgctgttgctggggttcagggatggtttctgtgtgctgttctgctgcattgtgttgcctggtgagagacattgataaatgagcgtttaatgatctgcagcagttcccactcactgcgggcaggcggattttagaacagaagtggaaataaggctttaattgctctgttaaataactgtaaccaaaatatgtgtattacattttagaaattaagttgtatgaaatcttaaatacttcataacacaaaaggaaaatactttagctttgtctcttaaaatataactcaggtagcagcactatgcacaggtttcctaaaactgtgaaactgatcatttttttcagatcagaaacagtacccttgtagtaagtagcatgcttgatttttcttatgactttgaccttttataaagatacacgtttgtatttaataaaatgttgcaagcttttgggcagaatttatcttgtactgcctgtgtagtctagcaaataagagcataaacttgaattccctgttcttcttctgttgaatttgaagatcaggttgttattcactacctcctgctattacttttctaattgaagtcagatgttttaactgttgcttgtaccgttatgttggtgtatgtgaagtctttattggtactgtcagatggtaggttctgcagaaaaaaaaatcagttctttgtttaaggaacatgaggtgaagaataaatacatgtgacgttagattaaaaattcaagatgaccatatggaaaagtgctgtaaggatttatctggaagggtataggggaaaaaattctaggcctttttatgatagggacatgggaaatggattgagagtctgggaaagggttaaagaggaagcccatagaatttgtgttaaggttttaaatatcacttaggtttcaaacagctagagagtaataagaagaaagagcattttagggtgaggaataggtgagcaaaagtaatgtttctggtattcagttgtcaaatgtaagtggtcacagtgatcaaggactccggggccttaggtgtgtcagtgccccagcttccaggcaggcttgtgtcattcccttgaaataagacctggtgtcttactgttccagctagcaccatttctggctttttgtcacttggttttgttggaagcagggctgtccactttttgtgtctgatggttaaagcataggactcttttgccttcttttgtccctcccattggccctaaagcattgaaacacggatgccaaaaataattcatgtgaatttagatgtttgtattaaattttctgtaaagtgtatccctttaattgttctggcctttatttaagagcatagtaaaattagacaagctaactggacaatcttacagactagtaaagaatgaaaaccaacattaaaccataacatttgattcttaatcacacgtccccaggcatatatactgaacatgtattctaaaataaatttacagaaatgctttattcaaccagtcagaggggacctagatacagaatttataatttaacagaggtggatatgtctttacataactatatgacatggtggagtatggagtatccatgctgtaagagaggtggaaattcagaagagggagaaatttttggattgggactaggaaaagattcttggcgaaaatggtatttcatatggtcttgaggaatgggcagtattttaacaggtgatgtttgaaggctacagggtgtggaagatgctataccagttgaagatgggggcctgttcgaaaattgcatttactaaggtagatggtagaggagactatgttgttgagggccctaagtggtggatagtatagactttgaagtttttcttgtaaaaagtgggggatttttgaattttttacagcagtggttcacaatgtgttttttaaaaacacatgccctccatgaatgtttgcaagtttcaaaatagacatttctttgatttttaaaatatgaaaatgtggtattgagtaatttcaaggggtttttgagttgccatcatctaaaacgagatatgttgtaggagaagcagatttttttgtggagtggagggaagggattgattgtacttagagtcaggttttgaatgggttaaaagtttttaaaacagctttattgtgttataattggcctacagtaaacttcacataattgaaagtatacaatttgatggattttgacaagtattacttgtgaaacttttaccacaagtcagataatgaagatttattacttcacttgttccagaattttatataaacaggattatatgtgttctttttgcctggttttagttcttttgagagtcatatgtgttgtgatacctatcagtagttcactgtttttattgctgagtagtatttcattgtgtgtatatactttggtttatccacttacctgttgaagcacatttgggttgtttccagtttttgtctattacaaataaagatgctatgaatattgttgtacaactttttgtatggacatatgtttttatttctctttatttcctaacattggagtgactcaatcatgtggtgggtatatgcctaacttttaaagaaactgctaaatggttttacaaagtagttgtaccgttttacattttcaccagcagttcaggagagtttcagttgcttcacattttgccatatttggtggtcagcctttttaattttagccattctaatacttgggtagtgatatctcattgtgtttctctgtgattaatgttgttgagcatctttgtatgtacttttttgccccctgtatgtcgtgtttggtgaagtgtttgttcaaatcttttgtcattcttttttcggttattgagcttttagagtttcttatacatttgatacaaatcctttatcaaatacatgatttgctaagcttttctcctagtccatggcttgtctttttattctctttaaaagtgtcttgaagatctgatgttttcaatttttatgaagcctaatttattcatttgttcttttatgaaagctgcttttggaaagtttttgcataattgtcccatgatcaaaaacgtttttgcctatgtttgttgttgtttttttccccactagattttacagttttaggttttatatttaagtctgtggtccatttggagttaatgtttgttaatagtgtgctgcaaagtatagatcaaagatcacttttttttgcaaatggatattcatttattgtagaaccatttgtcaaaaggactgtcctttctccactgaattgcctttgcacctttgtcaaaaatcagtcttccatatatgtgtgggtctgtttgtggattttccattctgttccattaatctatttgtcctgataccaataccatattgtgttgaccttctgtggccttaataataattaatgcaatcaggtagtcttaattctacaactttcctcttattcaaagtttttataactactctaggtcttttgcattttcatatgaattttcaaatcagttcgctaatttcttcaataaagtttgctaggatgttgattggggttgtgttgaatatatagataatttcagaagaattgatactttaactgtattgatttttggacccgtgcacatatatctatttagccctttctctcatttttctaattttcagtatgcagttttttcatgtattttgtcaggtttatgcctaagtatttcatatttttgtcactattttaaatggcttttaaatttcagtttctgatatatagttacagtactagcacatagaaatacaattgatataaatatatccttgtattctgtgaccttgctaaaatcacttaataatgcagctttttggtaggttccatcacattttctatctagataatcacatttcctatgatgagagacaatttttctgctttccagtttggttaccttgtatgtatttctttttcttgccgttctacattggctccaacctctatggaatgtggaatatatatggaacatagactacaatgttgaatagaagtagtgaaagaggacattctgttttgttctttatgttagaggatcaaacagtatgttagctgtagagtttttttgtcagtgtcctttatcacaagggtccccaacccctggtactgtctgaggcctgttaggaactgggccgcacagcaggaggtgccgagcactaccacctgagctctgcctcttttcacgtcacctgaagcattagactcgcatagacatgcacatgcaagggatccaggttgcgtgcttcttatgagagtctaatgcctgatgatctgaggtagaacagtttttcattctgaaaccatatctccccccatggaaaaactgtcctccatgaaaccagtccctggtgccaaaaagtttgggggaccgctgctttatcagattgggaaagataccttctatttctagttaatgaaagtttgttttaggtcaagtatggatgttggatttgtcaaatgttttttctgcatctcccgagattaccacatggtttttattttttagttaatttgatgaattgtactgattgatttcttaatgttaaactgataatagtgtttgctgaaataaaggtcactttgttatgatggtctttattttgattgtttgattcaaatagttacaattttgtttagaatttttatatcttatgttcatgaaagatattggggttttattgatttctgtttttctgttttgttgatttctactctggatccttatttttgttattccgttgactttgattttgtttgctcctttttttttttttttttttttttgagacggagtttcactctgtttcccaggctggagtgcagtggtgtgatctcggttcactgcaacctccgccccctgggttcaagtgattctcctgcctcagcctcctgagtagctgggactacagttgtgtgccactacgtctggctaattttttgtatttttagtagagacagggtttcaccatgctgatcaggctggtctcgaactcctgacctcaagtgatccgcctgcctcagccttccaaagtgttgggattacaggcgtgagccactgcgcccagcttcatttgctctttttctagtgtattaaggtaaaaagcagaagccattgatttaagaactcttttcctttctaatagagatgattaatgctataatattctccgtaactattgtcttagctgtatcaaaaattttgatatattttattttcattcttttcagaatgctttataatttgctgtttgctttcttccttgagttgtggttatttaggactattttgttttgagttatggtttcttccttgagttgtggttatttaggactattttgttttacttacatggttctgttactttattctgatttagtttgtcaccagagaacgtattttgaataactcgatttcctttaatttattagggtttgttttgtaccccataatgttgtctatcttggttaaagttgctttgtccctagaaaagaatgtatattctgctgttctttggtagaatattctctaaatgttaattaggtcaacttggtcggtagtgttgatcagatcttgtatatctttattgattttctctccacttgttctatcaaatattgagagacggatattgaaatctcttaatataattgtgtctatcgttgtagttttatcattttttttggtctgtgtgttttaaagctctgttaataggttcatagatgttcaggatttagtatgttctcttggtgatttgacacttttatcattggaaaataactttcatctcgtgatattcttcagactgcagcatactttctttgataatatagccattctgtcttaattttgatagcatgatatatcttttcccagatgtttacttttaatctattaatgtctttgtattagaaatttatttcttacagacacatatagttgacttgcttttcttgttgttcctggtctgaaatctctgcttctcatttgaggtatttagatcatttgtgtttaatgtgattattggtatgttttggtttaaatctgtcatcctgctatttatttcctatttgtgttgtctgtttttcccctttcctctttttctcctaccgtcttttattctgcttttggattgattgaaatttttaaatgatttgattttcttccttttattggtttattcattttaaccttgttttttaaatttagtggtttctctttatcttatcacagtctacttccaaaggatattagatcacttcacgtatagtgtattgaccataccatagtattcttctatttctctactactgtcctttttactgactttaaaatagattttgtttgtgcatatgttattaaccttacactacattactattattgtttaaacacttagatttaaataagaattcctgtattcttatccatttcgttatcttttctggtcttcattcctttgtataggtccatatttccatctagtttcattttccttcatcctgagtatttctattaacattttttgtagtgcgtatttactaatgatgtattctttcaccttttaggtatctgaaaatgcctttattttgctgttttttttttttttgacagatattttcagtgggtatggaactctaaatgacacttttttctttcagtaatttaaaaatgttgctgcaccatctgctctctcgcattgtttcttacagaaaatcttctttattcatttgtatataatatgtctctttttctggccgtttttaagatttttctgtttatcattggtttttagcagtttgataattacgtaccttagtttagttttctttgtgtttcttgtgcttgtggtttgttgaacttttagatctatgggtttgtagtttttatcagatttggaagatttttgaccattagtttttcaaaatttttgggttctcctctctgtcaggaactttagttacatgtatattattagggtgcttgagattgtcccagaactcagtgaatgtctgttaactttttaaaatctcttctgttttgacatccaatttcagttgttgagtactcatttggaattctgaggtagtttttattgctgtgtcttcaaggtcactagtccttttttctgtactatctaaccttttattagttttaccctttgtgttttttatcattcacattgtagtttttatttccatttctatttcatcatctcctcctcttctttctttttttaaaatagagacagggtcttcctatgtctctgtttgctatgacgggctggatttgaattcctggcctcaagtgatattcctgtcccagcctcccaaagtgctgggattataggtgtgagccagcatgcctgaactgtagttttcatttctagttcaatttgggtgtcttaaaaatattttccatgacatcccttagatatttgaatacatggagtacagttatagtacctgtttctgttttttgttttgagacagggtctcactctgtcacccagcctggagtgcagtggtgcttttgtagctcactggggcctcatactccagggctcaaggaatcttctcctgcctcaggcttctgagtagctgggacctacaggcatgcactaccaagcccagctaatttttaaatttgtagtagaaacgaagtctcttggtgttgcccaggctggtctcaagggagcctcctgccttggcctctcaaagtgctgagattacaggtgtgagccactgtccgcaaccatagaccagggtaggagatgtctttttttttcccctttcttttagagacagggtcttgctctggggcccaggctgaagtgcattggtgcaatcataacttactgcaaccttcaactcctcaagagatcctcctgcttcagcctcccaaagcactgggattacagattgagccaccgctcctggccagtacctgtttgggtccatttctgttaattctaacagctgtatcaattcctgattggtttccattgattgatttcccccacccgtatgggttgtgtctttctgcttttgtgcgtacctggacattttttattgtgtaccagccattgtgaattttcactttgtcgggtgccgagtatttttgtatttcttctgtaagttttcttggcttttgttctggaacagtcgggttacttagaaatagtttgatctttgagtcttacttctgagattttttaggtgggaccagtgcagtgtttaatgataattattcttcacaaatgggagcagtgtagtcctgtgtagtttatccaatgctcggtgagtatcgatgtttcccattctggttggtgtgggaagcttctggtagtttgctggcaatcttgggcattccttggcttctgctgcattacgcctatctttgccttctttctcacacggtggtcttcctgtgtgtgtgtctgtctctgtctaaatttctccattttataataacaccagtcatattgcattagtgcctaccctgatgacctcatcttaactaattatgtgtgcagcaaagcttttttccaaagatggtaacattctgaggtactggggttaggatttgagcatagaattttgaggggacacaagttgacctgtaacgttgcccctggaatgtttcctgaatatacttctgtgctcttagggtgttacacacctccttctctcagcttggtatgcccccgttcctttcttctgcttctctttcttaaaagccacctgctgatgagaacctctgtttagaaggtttatcagattgtaccttttattataaatatttacatggcatatttctgcacataaaacatttttgaagacctggagaggatttgtcccacttctttcactgtctcccagtaccacctgtagtactttataactagtgattacccgaattgaatacgttaatgagtatgtctgaacagacaagttgcagaatggacattttaagaaagatcagtaactgcaggaaggattggaggcttaggcatctggagtgaggaattcattttggagattattatagtaagtcaggcacgcattaatttattaattgagcctactaagtacggaagccttcactgggtatcaggtgtagacctgtgacaatttcagaatttgcctctgtccccatggaccttactgtgtgtggggagtcatgaggtaagaacagaaaagatggacaagaagggttttcctgaggaaccctagacaaaccttgagaatgattagtcatgggtgaggatgaagcatcgaaaaacatgatgccaagcctgggtgcatgagagaggaccgttagtagaaatgagaagtcaggcatttggtgggtaggggatgataaattagtttgcttctagataagatgagtagaacatctaagtagaaaatccagattgcagaaaactcacagttgaatggtggagtggtagatgttcttgcttgggtataaagggagagagagcaccagcagttagttgggtgaaggggctgacagtcaagagcagagatttttctgggtaggtgctacaccgaacatatttgtaggaagaggggaagtgactggggcactgggaggtgacatgcaattatttccattttacaaatgagaaaactgggacacctaaaagttaagaaaggtgccccagggacacagctagtaagtggtggagccagaatggaaatctgggcaggatggcggcagaatctgtgctcctaggcacaggatggtgcttctgatagttttctttaaatctattaactttttaatatgttagtttgctttcatagggaattaatactataaagttagaacaccagccctgcttgtcacttacagaaggcaagagtaaacacgaatatagggaaagcagaataattcaacaaaacagaatgcacaccggaaagtaatggaactatttgtgatcagttagtaactaaggggtgttttctgttagatgccaggaggtttaagatgatgaggaatgtttcggaaaataagcaacaagtatttgagcatttactgtgccaagcatttcatgttggtgcgggggatgaagtagtgactaagacagagtccctgcttttgtggagctcgttttgtaatggagagagatacacagtaaacatctgaacaaatagagttggggaagatgcagtttttgctgggaagatcagggatagtctttccatgggagtgctttttttctatttcatttggtttatttcaaatgagcaaatacatctgtggggtagtctggtttatagaagtgcccatcagtcatgcagatctcttgtatcatgaacagtgtgacattttttccccattggagtacagtagtaacagtttttccatatcaaagcccagcaccctctatataaaagagtagtcatttgtaatcagatgccaagaaaaagttgggaattttagcaccctgtccttaaccaatattagcagtcttaacattcttactggcagggcacagtggcttatgcctgtaatcccagcactttgggaggttgaggtgggagtattgcttgaggagttcgagaccaccctgggcagcctagtgagaccctcatctgtattttaaaataaaaaaacaacattcttactgtaattgatgtgggaggaagagcatccctgcttctaaaacggtaaatcagtgttgctaccagagtatcttaggcgttaagaagtgaacgcagtgatgtgcaggaaaatgtattggaaaatccttgttagtgacccacacctgctgtccttgttgctctgaagaacatgctacaactgcaagtttgaaaaagttttcctgagcattgggcctctcaacgctctcattttgcatgtaatggattacattgctgtcttattttagccatctcctaagaagtattagctctgaaaacatatttgctttttttctagaatgcattgaactaaatgcattactattaagataaatactgtagtggatgcaactcttaaaaaagctaacaagttgcattttcaagaaattcaaaatgaaaatggcctactaaggtctgtggggaaaacttttagaaaatcatttaaattgattttccctatttaataaagtagttaatgggaaaattcacatggctttccagctattaaaatattcctatcctgacatttgagaatctacaatgtataggcaggtttgaaattcttttttttttttttaatttgagtggtgtttcagagtttacaagtgtgctcacacgtgttacctcacgtgaacctcacagagatgtcagagtggcttatcatcccaactttacagtaatggcagatgagccttggaaaaggtcagggtcacacagtgagttagtagatctgaggctaaaatggacttttctgtttatcatattgtttactgaatgcctgtaatatgccttaggtacgcaagagatcttgttctgcgccccaccttgtggcggtggaagcacacaggtcaggccagaggaggagttctgctccttttgtgctccctctgtgatttgggagcatgcagttcttcataagaatccccactctcctgattgttactagtcttgccaccattcctcattgctaccacttgtcccctgtgtgagagggatgggttgggaggggaagagagggcacttaacatctgattacagaggcagagctttatgtgtaataaatgctctactctcctaacaggagaacttgcttcttttatatccccttcctccctgtcaatctatgattggatctcaggaggtgagttgagtgagacagtgttttctctgagggccttgtttcctgctcattcactaaagatttgtcagtgaatgaagcagcacttccaccctcaggatcttatgttatagttggggggaaagtgacaatgacacaccccatgtaacttataaataaatatattttatgatactaatatataagtgtacatatatatacacatttttatatgtgaacatacattaaaaaaacataatttcagaatgcctcacacgaatcttgctgccactcaagcctttaagacctaaagtctgcttacctctttttgtaaataaagttttattggaatatagccctactcattggtttatgtattatatctgtggctgcttttgtgctacatgggaagagttttgattaattgcaacagaagcttcatcttccgcaaagcctaaaacattcacactctggccccttaagagaaagcttgctgacccctgctcaggatgtagcaagcattgtactcacggcattatactcacggccatggtgcagctgcagacttagaaaagaaggcttgagttggcgagctgatggacatggcaggtgggtggaacttagcagtggagtgggtagtttctagcctctaggtgtgggatcactgtgctaagtcaggaagtgtggctaatctttgcttagaggtggggaacttgtgcttttaagaaagcacttggtgttttctagtaaatgtgaattgtggcgattaaaaaaattgtatattaaaattcggaattaacaagtttatgtaaattagaaagtgagagttgccgctgtcccctcaattcccactcttcaaggtgttaagagctgttaagagatggagtttttccccctctgagtattaacttctacttagtaatttaaaaatctgctatattttagaccatctttttttacattgtgaccctgaggttcacttgattcccaaaatgtagtcgggattgttcagttgagtgtttgttacatagaagattaacgtgtaaaatatttcagaagagattttaatagacatctccctgtcagttgatgagttgacattgtttttctaaatagttttagaattaggctttttatgacaagtattaaagcactttgtactgtattactggtattttaaatttttacaattttttttaaaaactcttgttctggtggagggtcccataatcagagtcacctgagaaacttcagaacaatgctggtgcctggtccccatttcaggcctagcaagtccaaaactctagaggtcaggagatcatctacatttgtaaaagctctgcaagtgagctatggagtagataacactttttataacataactttgtttttataataatttgtgggaaaataggaaggtttaacatgaaatattataggtatgatttatatttctagtacaggtcatgatttatgctgaaaaaacttgtatattttatttaaactcaaatattgagcaaaggagggaaatatatataaaacaagtatttaaaattttttttgtttgtttttgaggcagagtcttactctgttgccaggctgtcaggctggagtgcagtggcacaattacggagcactgcagcctcaacctcctgggcctaagtgatcctcccatctcagcctcctaagtagctgggactataggcacatgccaccatgcctggctaatttaaaaatttttttgtggagatgaggtttcgctatgttgtccaggctggtcttgaactcctgagccgaagcaatctgcctgccttagcctcccaaaatgttgggattacaggtgtgagccaccatgcgtggacctaggaattacgtaatttgatttgaagagtcatatcatttttcccctgctttacttttgtacctcttctccaagaaaaaagtctactctctcaaaaaccgaaaacacatttcttaacttctgggaggtagttttgtttgtattagttcaagtccatactggaatacgtttgaccagtgttttcaagctgagaaatgacatttaattatttgttatcatttctaggtagatagtaatttctgtatttactaaggtaagctaactggtttaacgaacacacctaatatttcagtggtttaaatcagtagaatttcttgccatataatagtccaatgactgttagtacaatgggataacagctctgctctgcagttattcaggctctgaactatgggcatttttcctattttaaatttaatagtgtccaaaggtcatcctaggttttggcatttgttgaatgggggaagagcatggaggttttcacacgcaatttttatgggtcagacgtggtagtggcacacatcacttctgttgacatttcattggcttggtcttagtcacgtggccatgctaactgcaagggaggctggaaatgtagtctagttgactcagggaaaaaaatgcctttggttatcaattagcagtctctttcgtgtggtcaaggtaaacaacatcagcaagacattgacttctctgtgagctacctaattatttcgtttttgcttttccttttctcattttcccatgtttttgcaattactctccacttttccccataaatatcctgtttttgaggtgatggcccgcattcttcatttactttcaagtctagtcaagtcaagtctcttggatgcagacaacagaaacccattcctggccaagttgggcagaaaacaaatgtaatggaaggctatatgttaacccatagaattaattgaaagctggaaactatgctggaaaaataagtaggggccaaagcaggtggcagcagaggacacagccagggtcgcagcagaagaccagtctgcttcggatcccacacctggcacttgtgcaatgcattgctatgtgagcctcaactttcctgcctccactgtggatagtctcttactgtccctacatcttgcaggagtgacccatcaagactccagagtctgaacaggagcatgtgattgtcaaaactttggtcactagcaaagccctggttaccagggaggtaaggtaggagatttgttagtttggtttttatacttggtggcatggcttttttgccttccatgattctcatgaactgtgaagagtgttcagataccaaatggcctaaaaatgacaaatacctatgtgggaacctttttcatcaggagaaataagttgtggtataagatgggaggctgtgttccaatcttgatttttatcacgttgttaagcctctgggttgcagccgccccctctgtaaagtgaggtgggggaactagatgtctgacagtgtctgttcatttactcactcattgaataaatatttagtaagtgccttttatgtgccaacacaaaagaattatcacacccttgccttcctatatttgggtgagtcagcagagaagtcattctgatacagttagggtgaagtgctcagatactctagccttgggcaggggtttaggagctcgtgagagttcccaggccagcctgggcagagagtgttggagtaggggattcagggaccacactccgcttctttcactcattcgtttagtgtttcctttaagcctttgccttgttgttatgagaatacaaaaataaataagaccagtacttccctccaaagcactaattgtgagagcatgctgatggctttagcaggcagcatgcttgctgtgttgagataagagcagaatacagtcatgcaccaaataacatttcagtgttggactgcatatacgacagtattcccctaagactgtaatgaagctacaaaaatcctatcacctagtgatgtcttgcgatccttacccaaggaggtcttggcttacgtgtatgtgtatcttaatttttgagaaaaatgtttaaaaagtaaaaagttaaaaaaatgaaagcttacagaataagaatgtaaagaaagaaaacatttttgtacagttgtgcagtgttttaagctgttattacaaaagaatccaaaagttaaaaaaagattaaaaagttatataaagtaggctaaagttaatttattactgaagaaaacaagttttaaaataaattagtgtagcttaaatgtacaatgtctataaagtcgaccgtagtagacggtttaatgtcctaggcctttgcattcattcactcatctctcttcctctccgtccctccatccctccctccctccatccctcccccacccattgcaacttccagtcctgcaagctccattcctgtaaacgcccacacaagtgatcttttatatcatatttttattgtaccttttccatgcctatagcacaaataatgagggttacagttgccctcattattcagcacggctgaacaggtttgcagcctaagagcagtaggctctaccgtctagcgtgggcgtgcagtaggctccaccgtctagcgtgggcgtgcagtaggctccaccgtctagcgtgggcgtgcagtaggctccaccgtctagcgtgggcgtgcagtaggctccactgtctagcgtgggcgtgcagtgtatactcagtgatgttctcacaaccatgaaatcgcctgacagtgaatttcttagaacatatcctcatggttaggtgacaggtaagtgttctgagggaagaatggagtaggggaccagttccctgtaagattctgagaacgtttcttagcatgacatttgatcctgggtcttgaagtttgagttgaagacttctaggaggagaaaataggagggcggggatagcatgctagttggagagaagagttgctgaagagaagagcgaagagctgctgaagagcaccattgaagaatggtgagaaggtcggtgcagttaagggaaaggatgtcatggaggggacaggatggagagaaatggtgggaaataagacgagaggtgtaaacacttaacctgggtactctgggtatttaaagtattgtgaagtattgattttgagctttttttttttttggttgtggacatgaactttgacagcagtagggggaatacactgagggagggcatggagcctggataaggagcagttattgtaggggattcccctggcccctttctggattaagatcttgacagagcatggaaataagcagctggattcatgagacattccagaggccaaagtcacagaatgtagttagattgagggggattgaggtaaagggggtggggaggtggaagtaagagagcgaataagattgaggtttctagcttgagtggatggatgggtggagatgccgtttatagaactgggtcaaacttggcgctactgcctgctccccagcctgtgcagacacagttaaatatagcatgccgtgctttccagctgaggcttgagttagctttggaatcttttctatagcagtgagtgctccagacagccactgccaatctatttgagtttgtactggagaggaaacctatttgccttccctgtcataggagatggggaggggaagggaaggggagcagggagaggaatcccacccacactagtccctcttttccctgcgctcttttcttcagaacacatcattttctgatctcacactcccgttttttttttttttttttttgcttgaggattcttctgtgcccagcaaaatacaaactccaggaggcctgagatttggcccataatttttgcatttatgcctttaatgttaagagcgttgtctggaacagcactgccaatagaaatgtaagccacttatgtaatttaaatttttctaggagccacatttttaaaaaagtaaaaagaggcctggagtggtggcttacgcctataatcccagcattttgggagggcaaggcaggtggactgcttgaggccaggagttccaaggctgcagtgagctatgcttgcaccattgcactccagcctgggtgacgagggagagaccctgtctctttaaaaagaaaaaagtacaaagcaacagtaaaattaaacttaaatatattttaatttacctggtgtttccaaaacctattatttcaatttataataaaaaaaattgaggtattttacattttatgttgctaagtccttaatcttgttttttccatttatagcacatcttaattctttgtagctacatttcaagtattcagtagccacatatgactattgttgactgcattggacggtgcaagtctagaatatagtaggggctcagtagatgtttgttgaatgaatgaaggagaggaagatgagttggttgttaaaggttgattgtagaatcgaggaagggttttgttctcacagtgaggcaggagcatatttttatgtttaagacagagctgggagagagagaggcggagataacagaagtcagcacgtgactgatggaggaaagcccgagcaggtgtttggtccaggggtctgcagccaggtagatgggaggagagatgccttgctagttacttccctgaaggataatcttcagttacattttaagagacttaactccagtttgtttggcataaacttctcattgaaatgtattataactcttccttccccacattttaggtgctggttagttgagggtcatttttaaagtcttaaggtgtttccctagtgacttaacaaaagaaaggaaaataaaagcctctttttttacgtacaaaataggaaaagtcttattggtgtatctcaacatctttactttggtatcactcagctagaaaaataagtactttctatactaaaaattgatttactgaatctgatttttagcattattatatttggagttgtataaattatatattttgcagtcaatataaaataaggttattttccccactgttgtccctcagtctttacatacttgagtcctcaatctcctacattgtctttcatattatgagatgtagtctcctttttttttttttttttttttttttgagacaaggtctcactgtgttgcccaggctgtagtgcagtagtgtgatcacagctcactgcagcctcgacctcctgggctcaaacgattctcctacctcagcctgccaaatagctgggactataggcgtgcgctaccatgcctggctgatttttaacgtttttgtagagatgggatctctctgtgttgctcaggttggtcttttaactcctgggctcaaaccatccttctgcctcggcctcccaaagtgccggattgtaagtgtaagccaccgtacctgatctccattactttgagtaacaaagtcttatttgaggttgacacatagacatggagcaacctctgtcaatagtagttttggatgcttatggaggtcacttgatggaatgagtctaaaaagtgaagcaatgaaatgtaacagattttttaggttatgacctcacattttcaggtaatgatattctaaatctttcaaaaaatcattttaaaaagtattgttgtaagtgaaaataattaatgtacctattgggttaatggaaaacaccacctttctgatgttaaaaaattttatctcattgttacttgagataaaatatccagttatagtattttacagggattcagtaagtgttgtatctaaaacaacttagaagttaagattatgtgctgcggaaaaccagatgacttaaagaggatttaatgacgacaaagatgctgatgttaaagatggagtaggctttccactatattgagaagggcaccttatccagacagattttaataagtgagattggtcttatctctttgcttttgggacagctttatattcctgagtgtgctgtgctcagccagatgtgataatgtcaaagccggtagtgattgtagagatggttattcaggggtggtcacctttttttttttttttttttcgtgccccagcatacttgagcaggttaggttacattctggcaaaaaacaggctcccaggacaattcttgggagatgggggagggagagagtggtgtatatattttgaagaggtcttaactacacagtgattctacccctgtgtgtgagggcctgggctctttggacagatgacatgttttttccagtgttatggagttaaccttagagctgggaccagaaccctggacttgctccttgtgccagttttaattttctcagccacacccttttctttccttttattttgtacccttttttcttactattttcaatagaattttaaatgtcatatgtttaataagatggaaactgctgatataaatcaagaagcagtctttaaattttaaataatggtacatttatggagacattatcaactaatttaatttctttttctgactttttaagtcacctcttttttccaagtcaccatggcttggaaccgctgagtcattcttgaatccagctgtctcttatctgtcgtccgtattgaaacaggttttgaagtcctgtcagtctgctctcagagtgtctcttcatgcatctccttcctttcttttgctgacaattccctccttaagggctctcaccgtcccgtgcttgggctggtgcagtaagcaactgatagatctctatttgtggttcctcctggttccagtccaccttacacattcgttctatcatttagcatttgccatttgccaggtaccattttaaacattaactctttactgttcttagtaccttgaggtttaagtactgttataaacccattctgcagatggaaagggaggtatggatttaattgatttgcccaaagcgacacagaagttggtagctagctagtaaatggcaaaattgaatccagactccttatggtgttaattgctatagctaaagatgaaactggagttgtgccactccttgcacacttttatctgtcaccctcttaggctgttttagaaaatcccatgttttagcttgccattctgttgacccagcctgcctttctagccttaacttacccctctgtctatattctattttccagccaaatatgaggtgacgtttaagctgctacttgaaagagaagtgggagttaggcagagcagtaggggaatcatgtttggggaagagtgaagagtgtacttgagagagtgtggaggtgccttggaggagctggagcccagaggtgccccatgagaacaacacaggaggctgcaggtggaggtgggtgcctgattgtagaatgctttctagttgtcttccacaggacatttttgggagctattcacaagattcatggctaccgtgctctaaaatttgatgtgaagttcatttttcctggacttcttacttaattcctctgtcttttggcccagccacccctttgccagtttacacgggtgatgagcaggctgtttggaaagaacgtcctcgagcagggtgctgtttcctaaccctgcgtctttttcccctctgagatcagtttatctttattcacttgcaggtgttcaacaatcttgtcttttatggggaatttctaatgtgtcttgagcactttcccaccctcctatcttggaggcatggttcagagtggaaaagggcgcgggcccacctacctctggccttcccacctcagccaccatgcttagggccgtggtggagtgcttgacctctttgtgtgtacaatgcaatacatgctggaataatgccaccttatgcatagggcttttgtgggtgtaagggcataccggaacaagttggcatagaataagagttcagtgaatgttgtcactactttttattactttttaattgtgaaaaactcacagattctgtaataaagggtcatagaaacctgctttatccatactatcattactgagaatactttctggtttggaaaatttgcttgagaggtaaaaagaaaatttacttacttacttacttacttacttatttatttatttatttatttatttatttatttatttatttatttagtagagacagaatctcgctctgttgctcaggctggagtgcagtagcacgatcctggctcactgcaaactgactcctgggttcaggtgactcttgtctcagactccggagtagctgggactacaaatgcatgccaccacacctggctaatttttgtatcccccccgcaagacagagtctcactctgttgcccagactggagtgcaggggcacggactcggctcactgcaacctccacctcccgggttcaagctattctcctgcctcagcctccctagctgagaccacaggcgtgtaccaccatgatcgcctaattgtgtgtgtgtgtgtgtttagtagaggtggggtttcgccatgttgaccagtctggtctcgaactcctcgcctcaagtgatccgcctgcctcagcctcccaaagtgctgggattacaggcatgtgccaccgcggctggccttttgtgtttaacttttaaagcgtctctggtcagatgaatattttgccttttgggtatttttaaatggaaaatttatgtaaataatcagtgttttaattagaatcacaaagccaaatgattgcctcattggataattttaagtattatgctgcaattcaatataggtaccaagtacttaactagacttaaaaatatcttgtatgtttaacagctgtttagctagaactaaaaaagagcaagtcctctatgtgtatgcttctccccttttctccctgggatgggagaaggaaaaagttaatttttttcccccttgactgctgttgctgtgcctgctttagaagaagacagaggtaaagatcagggaaggcaactttgtttccaaagaaacattatgtgcctgaaacttagtaacaccttcagacacttcttaaaatggcttggttatggcatagctgaaggtctgaggctgtggtaggtaaccttctgcctgtgttgtattcctggccgcctctgtgtgttctgaccctgctcctctagagaggaaagcagctaagcaggcacctttcaacttttgaatggcttcatagtattacagcatttagatgtgttgtgccattccccctctttttgtacttacgggtttcttggaagacagctgtaatatgcctgtaggcacgctagacaaagttatggtcaagggggcggtaggggagggcatctgggtaatttactgtgtgtgtgtgtgtgtgtgtgtgtgtgtgtgtgtgtgtacatatacatatgtattatattttaaaaattttacataactagtatttcactatctttttgattttgaaaaaaatgaactaagttgaactttaaccaccatttattaaaacatttcttttaagctctaaacagaggctccagatcgtctttgaggcacatttcctgtcccctggcaactctgtgtgtaacgtttcaaacccaaggcattgtacaagggagaggagtactttgggtttacatggttgagggtgatgatgaatcctcttatttcatgtgtaagaagaccgggttatttgttgccatgccccacactgatgctggggccaaggcaagcaaaaggggacgcctaagtcctagcctaatgtctgtcttctgtagagcaagctgaactttcaaaggtatttctcgttttacctgttttgtaaatgaatatgctaactttgcacgccgcagaggaatgtgagatatagagagcaggccgaggtccatggggcttcataaagggcattttgagcagctggaggcttgtggttaccatgtccaggctcttcccctgctctccttaactatcctacagatgcctctgacctgggaggaaggaagagaagccctcatctcctgactgagagtgggaagtggcagtcactgaatgtgcttgccgtgtgacattactgcatgtcaggctggcagttcactgttttgtgtgtggaggactgtttctgatgctctctgctatttgctaagccataaataaggatataccgtctgacaactactataatagtatgaaggacagctttgaaatcaagacgtctgataaccttaagctgtggtcactgtcatttttctcttgaaagatcctggactctcaggatctggcttaccatctttgatggacaatcattttattagcttgcttgaaagaattagttcctctgttataatcactgtagtgtcagttggaatgacttgagccatttttgtaaaacttgtgaaatctttatgtatttatgaaagttaaacttactgaaggctgaatgactgcagtgaaagtatgaatcctttaattaaataagtggttagcatttatataagcagtctaattaggaccccaaatatttgttcattttctttagggctactaacctggatgcccgatggagtaatcatcactgtcctgtgtagatcttgtagatttttgaaagtactttctgtctcacagtggtggtagattttgtttatttaattatttagggggcatgttttcagtttagcctgattagttacctgctgaataaataatgttattctaataccctgctaggaagaaatttatgtaattgaaattctgatttctatgtaacgttctgttttcgtattgagacatgatactgcctgacagggctgcttcagcagctgtcatctggtttgttgtttcttgtgttgttatatggattctgctagcctaaaaggcattcttctctgtgtctctgcagggctgtccagtgagtcatctaaaattaaactttgatcagaaataagtttcgtttttttcccgcaaaggactggagtgagtgggcttgagaatacttgtatgcaaattaaaaatatatatattcataaatatttgggagcattaggtcaagtgccaattaagtcaggaaggatcctgcagccatagtcatgaagataaactttttaaattgcatttgctcaaacttaaacatgtttgtgagtattttgtataagcgaccattatttcagttgctatgttagatttgttgctttctttagcatggattttttttttttggtaaagtgttagtttttaatgtttcaaaagattttttttgcagtcatttaaaatcaattgtcagttaatacctaaaattcggcagattgtatgttttatttattgcaacatgttgagaatcttttgtttcctgttgacattttaaaaatctcctaatggcagattgatttgtctgtgctctttttgtattattaagtcaggcagcagatacttagagagcttctgctgttttaagccatggggaggcagtagcgaacaaaaggggtgggggagtcttgcggcgttcacatctcagaaatgttactgcgctatgagggagactttggcctctaatccactgttagccactagcctccagtcaaagttagagaaccaccggtcttcattcttttcattaagtggttggacttgtctaaaaaggtttaatttcacctccagactttgtcttgagacattgcgtgtctttgtttacctgtcttttgtttccaaacgtccctacgctcattcctagatttaattaagggctcaaagactgctcaataccttgttttgtactaagtagggaagaattttaatttaaataggtttcattactgattattaatttaaaatttatgggcactacaagaaaaactatttctctacctggaattttcatgactgccaataacttagtactaggtggtattatctgctttattcattcttattatttaaaatattttataactttaggatattaaagaaaatataaatttacccatattatatgttatcctctgtacaatatgataatttatggaatccagcagctatatgttggattactattttaatcttttctgtcttccagatggtattaccaaaaataaatccttggcctcctatttcagctgtaagaatttggcttaccttttgtaatcaagagtggtaagggcccttttactgtagggttaagtaagattttctgttatttagttgttgaggatagtacagttcctaaaaaatgatacgtgcttgttaaatacagaatgaatgaaaagcacacatctgcatattagtcttaaagttttaagatgattatttttgattttcaaatataggtagtatttcattttatttaagttatacatttatttaaattatctaagttataataaaatggcaaaaccacaactacttttacaccaaccgaatacttacatttatttctcctgtcctttgtgctgtgattgttttatttatatgtaataaactccacaatgttatttttgctttgaacagtcagttggctttcaaaaatattaagaaaaaatgtcttttatatttatctacatacatatttacatttctggtgctctttattcctttgtgtgaatctcagtttctgtctggaatcattttccttctgtgaacttgtgtgaacattttttgagggcggatctactgttgacaaattctttcactttcatgggtctgaaaaagtattttgccttcgtttttgaagggtgttctcaccggatatagatttgtaggttaaaggtcttttttattttcatcatttaaagatgttttattttcttctggcggtgcacatggtttctggtgagaaagtggtgactcccctatatggaaacaggtgtttttgtctctggctgcttttacaatttttttcttcatcattggttttcagcagtttggttgagttgcctcagtgtgatttttgtgtgactttttccttttttttttttttttaaacttgttttcagtttggttaatttatattgctttgtttttccattcacttatcttttcttctgcggtgtctgaactgctattaggtccgttcagtgaatttttcatttgagttattttgtttctcatttttagaatttccatttagttccttttcgtagattctatttctctattaagattcactattcccttattttgtccatgttttcctttatattttaaaacattcataatagtggttttggtctgctaacttcactctttctgtcatttctgagtcttaaatggattttttcctcccgaatacagaccacattttcttgcttcttgctgtgcctagtgaattgggctggctatggggatgaggaatgctggcccgtgagtgtttggattttgttgttctctttaaagagtgttgaatgtcgtcctggcaggctgttaattcacttgcagaccatcttgatcctttgaggtttgtttcagtctctgttagaacaggggccagcctttactgtagggctggattagccctagccctaaatgtggattttctggggtctctgttgaatgtctgtgggtttctccactgtagcctgtttgaacactcaatgtcttacagtcttgtgtgaattttagtagttattcagttcacagttccctggtagttgttctgtgcctggcttcatggtccttctcccagtgcttgtgcagcttagcatttggccaaagagtcaaggagaaccctatgtacggattgatggagctccttctctttttgttacctgctgcacaaattccagccaattcagtggccttgaactcttccttctgtctctgcagcacagtgagattgctgtgttctgtttgggctcccccttcctatattgtaccctggaaagtgcctctagataggaaaccagggggattgtagggctcaccaagagtgatttcttttttcagtcatcacgattctgcactgcctgttgtccagtgtttgaaaacggttatttcgtatgttttgactagttctttagttgtttatgatgaatgagggagtctggtaccaggtactctacaaaggtcataagtggaaatctgataatacaaattcctaagggtaacatgtttttatccataacccattgttactaacaattttaatatatagattcagttaatctttcatgctgaaaaacctgagattttatttacgtcttatatgagcaatttcattgtgtttctagataattgagtatgctcttttggctagtgggttgacaagcttgtgtgtgcatgtgtgtgtgtgtgtgtttaatgttggcacgtgtgtgtgtgtgtgtgtgtgtgtgtgtgtatcctgtagtaacacatattggccactagagggtaataagaaagcagttcatttgttcttattggctcactgttactaaatagtccttatcattagactttttgcatagtcacagtcattgcttactttcactttaatatatatttatttaacaccttctgtggagccaggcactgcactgtgtgcttgggatataaaaatgagtaagagcagttgactgagcaatagctgtagcctgtgctataagacttttctctgcttttgattcaagaacccctcatttaaaaaatactacattcatccttacctcccgtgcagtcccctccctccctctctcaatgatttcttcacagtctaaatattcctgatggattcagttcattcctttattgcacagatatttattgaatgcaggccatgtgccaggcactgttcttggtgctgatgataaaatcgtgaacaaagcttactcatggactttcgttcacttaccctcttaatcatgtgcctttatttccggccatcattagaggtgcaattcattttggatgtgccttgttgctagggacctcgtgggtttttgcccacataagcttggttgccctcctcatttcttagtggattctgtcttagaacctcagcctcataagtttccacatttagatgctatagttttaattaaattattttcatttactttttgttctttaatattgttctttgatttaactgtttctctttaaaatctactatcaattaatactgtcacaggaatggtcccctgttaacacattactaacaaagaaattcaggttaggtaagaataacattcagatctacaagtagagctacgtgtgggttatgtatcagagatgatggcttctgatacttgttatttttacttttttgtttttaaacttagggtcttttctcatgctttttgtatttgctgtttcctctgtgtttaccactatctttttgaatcttatgtcccagtctttgagatgtgttgtttatgaaatatttctctgtagaatcagtgctgatccatactggtaatatggtctctagttattatagttccttgctagaacatagtaacgtggctgaagtaagaaagctgcttcatttttcttttagtaaaatattgaatttttcccaagtttagcaaagttacagaaacatgctcatggtaaaaatgatccatacagttcagaagcacgtaaagacagaactccacatgcatgattttctccaacatgctttccatactgtttgacagcagttgaaaatactttggaactgcactccaaatgatgattttagatagctttgaattatttgttaagttcatcattaaattataacattatctgatgttaaaacatgtattgtgatacattcttaagctaagatattattatactgagttgaataaagattatataatacggtagatagtaggttgaaccatatgaaattactgtttttgtaagccaagggtagtcagaaatctatcagcagtttcatatggttccgcataatactttatatgatcatccctgttacaggatgaactgagtcattttttccattaacatttgcattaaaattttaggaagatagaaacttaagagtaaaaacatgggtaatttgcttaattatgaaatcaggttaactagaaatacgcatattagttttgtccccttggaatcttatcataggaaaggaatgaatgaatggataacttaaatactttttggtgttgcaggaggaaattaaacttaggtttattctgaatttcatacacagcagtcgagttaagaaaggagacaatgagcatgtggcaagcacacctcgtttatataccatgtttaccagcagtcctcctgtactggtggcttaatctttcttcactttcactaaataactgataatgtcactaactagttatgataggtgttataatacatagctaaaaaggtaccagaagtgaaaaagttttttcttgccaattcacattcagatcatccacagcaaattccaaaaagaacatcagattctttgtcacctagcatatcaccgttatgcatgggaatgtgtattattctccctaaaaaaagtttcaactttataactagaaaagtaaatctattggggaaaaaaaaccctctagtgtattgtttagatagactataacttatttttggattatccactacttgaattagttggagaacagctttcttttattaaggtgaccaatgcttttcaaaatagtattggcatcatctgatgacttgttagaaatgttgacccttggccaggcatggtggctcatgcctgtaatcctagcactttgggaggccaaagtgagtggatcacctgaggtcaggagttcaagaccagcctggccaacatggtgaaactctgtctctactaaaaatacaaaaattagctatgggtggtggcgggtgcctgtaatcccagctagttgggaggctgaggcaggagaattgcttgaccctaggagacaaaggtggcagtgagccaagagtgcaccactgccctccagcctgggtaacagcgcaagactctgtctcagaaaaaaaaaaggaaatgttgactttcaagctctactgaatcagaaccgtcatttttaaaaagattgaaaaacaatttgcaggcacattaaagtccaagaagtgctgttacagattatgaatggcattgtcacctccgcaagacagtgctgatgcagcccctcagtaagtgcttgttgaatttaatgcatataattcactcaatctagattcaaaaaatgaaacaagtatttcaggagggtagtgataacagcagtaatcaagggaactacctgtttctttgtaattctttcatagctatctggatgtcacagaattacccatctttccttccagatgcatctttcagtctgattctatccatgctggatggtcatttggatgtcttgtgaatacagtagatatacacacatatgtgtatggatgagagagcaacagaattaaaacagaaatcaacatagtggatgagtttagggagtaattagattttgattagtcaaggatgcataatcttttgtaatattgtaatatataaggtaactaaaaaataaaaatatggggagatgatataaaaaattccagcaaaagataagaaaggaaaaggaacataaaacagttggaacaaatagattgttagtgttcatttatagatacagctcaaccacatactctttacaagagataaacctaaaatacaaggaaacagaagaaggtaaaggtaaaaagatggacaaaagacataccatacaaaaattgatgcagagaaggcttggtgtagtcagactgataacagataaagcaaaaagctttactagaaataaagagggcagtttatgatgataaaaggtattattcatcaggaaggcataacaaccctgaatttgtattatccagtataacactttaagtaggagatttttaatacattgttgttggtaactgatagaacaagatgagaccaaaatttaaaaaaaaatacctatataagacagcatacttaataaaattaaacctttgatgaggcggaccatgaagaaagagaagacctcattaaccaatgttgaggtgaagaggatatcacaaaagcttatgagaagatattataaaaacttgatgtcagtccatttgaaatttagatgaagttatactattagaaaactacaacttaacagacacagcagaaaatagaaaatctgaatagtcctattaaacatgatccttagtggaaagagctacccactagttttgaagtctttgggatttacaaaagaaaaaaaaaaaaaaacaaaacaaaaaaacggaaactatccacaagcaaaactcctggtccagaaggtttcaccagtgaatctaccacacacgcataaaatcatgaccaaatcgcattccagaaatggaaaatctttttttgtttgttttcacaggatcttgccctgggctagagtgcaagtggtgcaatcatggctcactgcaccctcctcctcctgggcccaggtgatcctctaacctcagcctcctgagtaactgggaccataggcatgtgccaccacaccctactaatgttttaatttttttgtagagatggggtctcactatgttgtctaggctggtctcaaactcctgggctcaagtgattttcccaccttggcctccagattgctgggattactggtgggaaccaccatgcttggctcaaggaaagtcgtttatcatttcaaaaatcaatcagcgtcattcaccacatcaacagagtaaatcagaaaggtcatctcatttcagtagatacagaaagagcatttaataaaagtcagcatctattcatgaggaaaaggtcttagaaaactagcagtagaaggaaactttgttaatctgggaatagtatctgttaaaaacctgcagcaaccataatactggagaaatgttgaaagctttctttctaagaaagctgtatttccaagattgagaatatgtgagagtagtgtctgttacctcctttttaaatcatcactgtactaaaggtcccagcaagtagaataaggcaagggaaagaataaggattggaaaagaaaaataaaattgttcagatgctcactagccacatgtggctatttgctacattactgatacaggtaaatccatcattgcggaaaattctgttgggcaccaccattctatagagatcaatgcaatttcaatttcaacatcccaacatggatttgttttggtggatttgatgaggtgaatcaggaacttacatggaatagccaaacttacttactttttttttcttttagaggtaaggtctctgttacccaggctggagcacatacagtggcacaatcataactcactgcagccttgaaatcttgggctcaggcagtcctcccacccgagcctcctgagtaattggaactacaggtgtgcgtcaccatgcctggctttttttttttcttacagagatgaggtggtggtgtgtttcccaggctggtctcagactctcgggctcaagtgattcccgccttggcctcccaaagccctgcaattacaggcatgagcccctgcgcctggcctgccaaaacattcttgaagaagaacagaatttcctgttggatcttaaaatttttaaagctattgtaatttaggtagtgtccagttcttgaacagagacctaggtaggtaagtctgtatccagtagaacagaataggcagtccaaaactagatccaagcataaagggaaatgtgatttatgataaggatggggttacagagcagtggagaatgtttgtcttttaaataattggttaaggatcaattggatgttaatttggagggggaaatgaaacttgattcctattttacacagaagtcaaatgcaaatggattttgcatttagatgtgagagagaaagcccagtgtttagaaggtaatagatttttttcatgactttgatataaggaaaaatttcttagattccaaaagtatagtactaattgtaaagcaaaagttgataaaattaagaacttttattcatcaaagtataccattaagagggtgacaaggcaagctgcctgtaaccaataggggctcgatcatattcagaatatggatttttaaaaatcctagaaatttgtaagaaatgggcttacaattcagtagaaaaaatagaaaagcaacctgaatgtacatttcacgatgtgatgtataagtggccaatagacatgcaaaaatgctcagagtaactaggaaaatgcaaattaaaaaccacattggagtaccacagcacaaatacacttagcataatggctgaaattagactgatgattgcatgccatagtgaaggagtggagcgtgagaatttttcataaactgctagtggataaattgattggaacaaaaaaagaccagaaaaacaacaggacagcatctctgtgtataccaaacgatgcataacaagaagcttacaagtggcagtgttcatagtagccccaaactggaaataatccaggtgtcggtcagtagtagaatggataaattatcatttgtccatattgttgtaaagcaaggtaatggacaaactgcagtttataggcataagatgaagtaaacaattctactctattacattagtttgtacttgccctgctataaataaatacctgagactgggcaatttataaagaaaggaggtttagttggctcatggttctttcttcaggctgtacaggaagcatgaaagcctctggggaggcttcaggaagactttcaatcatggcagaaggcgttggagaagcaggcatgtcttacatggcctgcaaagtcaggcaaaagggggaggtgccacacagttttaaacagccttttttcgtgagaactcttatcacgaggatagcactaggggggatggtgctaaaccattagaaaccaccctcctaatccaataacctcctaccggggccctcctccaatattggggattacagttcgacatgagaattaggcagggacacagatccaaactgtatcacctgcttatatgaaaacatcacgcctgtaatcccagcactttgggaggctgaggcgggtggatcacgaggtcaggagatcgagaccatcctggctaacatggtgaaaccctgtctctactaaaaatacaaaaaattagccagcgtggtggtgggcacctgtagtcccagctcctcgggaggctgaggcaggagaatggcgtgaacctgggaggcggagcttgcagtgagccgagattgtgccactgcactccagcctgggtgacagagcgagactctgtctcaaaaataaataaataaaaacaaatcgggttttggaggtcaggatagtagtaacttttgaggaagaggaaggaggtgttggttagaaagggtcatagagtggtgtggtgggtttctgggatgctggccattttttccccgtttcgtgacacagattgattttatgatagtaatttaagctttgtgctaatgatttttatcctcttttctacaatattgcattgaataagtttaaacatagtatataacagtgacatagataataaaaacagaagctaacatttttataaaaagtgtttggtgtgtgtcacaggtttcattctgtgtgcctgttggtggtatctcatttaaactttgtaacaaggaatagggtcagtatagtaatacctctgcttcatagatagggaatctaaggctttgaatggttaagaaatttgccagtcacagccttagtcttttactgtttataagaactttttatatattaaggacctcaattctttttatttatattccttcctacctttttctttttaatgttcagatttaaaagccctcatcacccccagtatttgaatttagattttcaatgttttgcttttacaaacaacaccaggataaacatgcttggcatctttgtgcacatcattgattattgccttagtgtaagtttgtagaagttcttttaaaaagtgaacaaggttgttttacagaattgaattgaatgaaagtatttttgactatgaatgatgaaatgtttagaaaagttggccatctttcaccacagttgtactatccttttacttatttaataaacattattaatcatgtagattgggaaagttaaggacctcactgtaatggggagagacagaagagaatctaaagtctgaaagcaatgctaggggcagttgacattccagcttcagcaggggtagaggacttgagatttgtattttagaaaggtcactttagccatgttattgagtagatccagaattgaaaatagaataaagacagctattaggaatctgttttggtaatcttaagtgttatatgtggtgatgtagatgaaaaggttgtgtttgagtattctgttaggagagggaatgagcaagattgggcagctgtaagggaagaactctaacatgactgccagagtgttgagtctcgttgactgcgtaggaaatggtgtcattccctgtggtggaaagtagaggtggaacttatgtttggggagctttgttctctttgttttgcagagtgtgtgccacattcaggtagagatggtatgctccacaaggtgggcactggccccatgagcctttactgcacattgactgtgcattactctacagtacttgcagataacattgggccatttattaattgccagagctgttctgagtatgttgtatgtactaaagcactaaaccttcataacaaccttttcaggtaggtattattatcattatcaggatattaggtatgcatggccatacagctggtcaccggtagtgctgggatctccaaccccagcaacctggctgagagtctgtgcccttcactgttggaccaccattattgtgtgtcttgaaaatggtagaagtcggaagtattttgctactgagcgttatggtcggttgtgttgtggctgttagctggttcattcaggaggacaggcacaagtattttgaatctagtcattcttgttgaccaaggttttaggctttagtctgtgattacaaatttggctgaatttaagaaaaatcttttttttatccttttcttaaagaattaccttttattagataccattacttttatggaccaaagtgttaatttttcatttccaccatggatatcatgatcatggttcatcctacccgtaggataattattggttattttttctttgtggtgagcttgccaggtctagattcccttaggactgtttgaaaggtgcagagaaatccaacgaccttgggttgagaagtttagttctgtgttttatgtttgttttcctgtttttatatccaacctttgattgcctgtgtcagtggagagcaccataaggtttcacctggtttggggaatgctggcgatgttgtttgccgtaaacctggcagcaggtgcaaaatagcatctcagaaatgttcctttgagttggtttgtgaggagctggtctgttggagaagtccctcaataattaaaagattacttatttaacttgtattatggttcttaatttatgaaaatctcgtaggtgaaagtaagtcttaaaggttgttgctgttgctttacaaaaagattttctgaagattttctcaatacaagtttatattcattttaatcactatggatcttctataccattaaaaacataactgttgtgttgagtaacatatacctgtttgtagttagaaaagttttttaatattgaatatcctaaagttcttatttaaggaaccattagatatgtcaaatgatacaaacattaggatatgaatatttcctttaaacctcacttatcttcttgtaggaggagagacttcagcatgcaaaccttcatctgttcggcttgcaccgtcattttcattccatgctgctggccttcagatggctggacagatgccccattcacatcagtacagtgaccgtcgccagccaaacataagtgaccaacaggtttctgccttatcatattctgaccagattcagcaacctctaactaaccaggtaagttcatggagtatcagaaatgactattggaatggcagtttattccttaaaaatgttggaatactaagtaggcaaaatgctttaatggctttcagttttacatgcaacgtgggattatggattgggaaaacatgttaagaagtttgcattaaattttttttttttaatttttacttgtatttcacttaaacactcataaacataaccacagtctctcattctgtaatagaaaggggaaaagttatttctgaagaatattaaaggatcttgaagaaaaagcttatttttatggaaaggtggctaagttaaaaccgttacaggaaagcaagtcagattccattacagcaaacttacagaaccaattttgtgttattttaaactacctttctacacatttgtaaaaataaatacaaaactccctaaaattcaaaagagatgtatgcaaattaaccgtgctatttattctaatattcagacaggctattcaccatttttctatgaagtgaatggtgtaaatagaatacatgctgaactcttggtactcacacacacatacacatgcatatatatgtatgtgtatgtatttttaatatctttctaaattaactgcaccgtctacgttgagttttggtttgggagacttaacagctgtagttgtgtgaaagtttcttgccccacggatatttgatgtgtgatgagcactgaaaatggctgcttttccatggacttagaaatttggtttgccattcttttgtttaggtcttttaatatattgtgtgaggataaaagagttgggagatttaaaagtatgtcttttcctggtgtcttgtttatattaaaacgtgtttgtaataaaattttgctagtaggctgacataatgtttaaaatatacaacatgttaacattcacagttaaatcgttacaataagatgaatttggcaggacttaagattttatgtagtgaattgatttcagtttagttgcgtgtttgagaattgggacagttgttcagaatgtccaagtttaggaagtgtttaattgtgtaccagaagaaaactgcctggaaatctaataataataacacgatgatccatttgcactttgaggaaaccaagttgattcagattaattttcccacttgttcaaaagcagcctgtcaggcagagtgctgtttttaatgtgtttcacagctgaaaggactgcgctcccatttgtgacttttccgtgtgtgagcaggagactgtggggtccagcctgggcttccttcttcttagatacagtgctctttcaggtctaacctctggtgtctacagcgggctaggaaaacttccagtcctttaaagtcatttttatcattatattattttagtaaataatttaattaacaaagcacctatttttatatccaactaacgtcttatgtgtatttggatcatataaaataagagatatttcacttactatttctgttttaagctatgaaatacttttaaagatttgtgtgatgtaaaaagactatctttaaagtaataatactcagccaaatatttctgccaaaatccaaaaatttctgggcctaataagggagtcatattagaggatccctttcctgtaactaaagtgtaggctgcgtattaagtggcatagtctagtcataggacctggcttcaaggtcttggccggctcatgatctggttgtaggatttgagttaggttatttgtacccttcatatctgttccttgggtgtcaaattggcacctccgactagaacccccaacacatacaaagtaccttttagctgtaaacttactgtaatttcattatttaattttcattgtttcttgttaatcatcctatcagatgtcttttaaaagagaaatagagcgaaagtaggtgtagaagaggaagactgatgtttggaatgctggctctctgggctattctagttttcacaatatcttccatagttcttaaattctagtaccctggatatgtgttatagatgctattcagctttattaatgctctcaaaataacaagaaaggcagaatacagtgtttctgattcttcattatataggaaaacaggaggtaaatataaataaaatgaaataggtattataatggaaaacagtttttgaaaggagtcctagagcttatactaaagaatcttttcaggacaaaagttaattattgttttagctcttataactgatctaagcaggaggtttgtaatctgggtgaagtaaaaggagcaagagatgtgagcattgagggtgtactgtttctagctcctggaggcagatagctgaggcagcaggaggaggtcacctcaacttcccttttattaggttacttgccttgcaaaaggggtcatttctgcagcttggtgagctcctgggtcctctgaacaccatggacttaactttttgctgtagaaggtagaagggagcttgctctattactgtacattctcttgactttggctagcagaagcaggaagtagagaaagtgtcagatgcttagggctggccttgagtgttagtatagatatataagtaggtatttggaaaagctgctttctaattctggatatgtactaatggcatcacaatgttccaaaagaaaaaattggttaatatgaaatcacaatgaaagcatagggagtattacttgctttgtagacatttatttgttctttccatgtattttgagcatctcaatgcaggatgttgtttgaagcatgaaatataaacagcttggccttgtaggcagagtatgaccagttgtggaaaagattagcaacattttgtgaagtgctaagcacacagcacacactcatattgagtgcagaaatttgatcatgtaactcatgtttatatcctattttgtatatgtactgtatatttgaaatttttttttgattatatgtgattttggtgttttttagtgagcatcattactcctgaatgtagttactgattcttttttcagatgtttgaaataccagtggaattgtaaatgggcaagttaaaaacttaaagacattcacagttttttgatgtaactaattttaataaatgcctttgcttattttaggcatacctcaattactttgctcaacaaatagcctaaaaatgactgctaagagggtagactagaggcgtaacattgatagggagctcctggcaagagtgtcctcgttaagagcctggggttaggcatggacatcttcagctacaatattatagtagctgcactacgataatatttcggaccacccggatggtgattttcctgttctttaactggctctgggaccttggtcaagttctttaacgttggagactctggtttcgcgtgtgtaaaatggtcacaggaatggtatttatctcccttgagattgttgaggggattgcatggaagacttgtaaaaatatgcatgctaaaaacatgttgttcagtaaatacctgctactgttattgttactttattattaagttattcggttgactctaccaatgacttatacttcctgtcaacttttattatagcagtaatgaagcattgcactgattcagattttgtgaaacctcacatttaggctgcactccaccagcccaagaaaggggcttactgaataaactacctacatgaaaacaatgctgggaacttaaattaaaaaagaaaagacatttaagggaaacctttcatcaccctaaatgcttacagcattcattcacagaaaaactgacgtttattacccatattaatttatgcattaagtccttaaggaatagtataaaaatattctgtgaacttagcattagctactgtttagaaaagtaagactgtctatttgaaaaattaaatcagatcatcttcttaattctgatgatttttgtcagacaaatagtataatcaccaagggttccccccccccccaaccttatttggaattaagaagcacaggactttgagaagagatagtgttatttcagtaaatgggtgaatttgccctctgggtaacaactttttagagtttgagtatacatgcagaagaaaccagtgttaatgttggttcatgataaagcgcacgtagtaaagttcatgatttacagcacgtaaaatgctgtaacaattctgtcttttcggaccacatggatggtgatttttcctgttctgtccactggtacaaacctcccctcttctcttttttggtgtgggttaggttaacaattataccatgactccacacatttttgcgaggtcttagtatgatgtgtttactgtcactctgcccctccgattgacccgagtgtccttggagagatgttgtgtcagggtcttctggctcatttcccagcacaaatgtccagaagagttgggcaggaacacaaagatgggccagggggaatggctgtgaccaccttgatggaaataattggttttgaggatctgttgattgcaagaacccccattgggaatcctttgactgaggcatggcacttgctggagcagtggcacttggacagcaatccaggatcattgatgctagccacagcactcctggggtgtgtgtatagagggggtgcatgcccctgctctatcatctgttgtaattgctgtggaaacggtctagcaggatgctcacggtggaacccctcattgcctgtcagatggtgtcgagagccatgagttgggatcagggaaggggactgtgagggcaagccttggttaggggcagatatttgtcagagggcagcagggtctggagacattaggagctgaatttcttcttattaggagcagttggagggaatggtgctctgctgccagcccccttttttggtgccagctgggtcctgaaatcctatgttaaggaagctgaaagttgcctctgagggctgggtttatctttgtctgctagttgtgaacctggtcaggttttaggaataattcagaaaaaaattttctttgggctaattgtgtggtagagaagccctcgtgggcaacatcctgtgtgtctcctagattggcgtatgtctgcatttctaccactttaaatttggcggaataggatcaaagcctcaggcagctgggcatattatcctctaatttcattgatttgttctagtggttgtctttattggaatccacatgaaagggaactttgagagagaatgtataatcatctaatgtgtagctgtctttaaaaaagtagatacatgcaggttacagaagagggaatttatatcttatagttaaagtgctagtcttttctgtctatttaaggtgatgcctgatattgtcatgttacagaggcggatgccccaaaccttccgtgacccagcaactgctcccctgagaaaactttctgttgacttgatcaaaacatacaagcatattaatgaggtaagacttgatttgttataataacatctatcttgcagtatgtcattgagaaaaaaagtgtgacctatttaccctaaacttttttttcattcctagtagttgtcatattgatgattattatgaagactaatgatttagaaataatattacaattatgtaaaagatatattaacaaggactgcagagtataaagataattgtggataacttgatttttttaaggttgtatttaatatactgttatttctttttttaatttttattttttgttttttatttcatttgagttctgtaataacttattcaaaacaagaaaggggaataaggactctaaaagtatatatgtgttagaatttttgctagaatttttatatatttgtttctgcttttgccatgggtgtcaggaagctctgaaatatgtttaatacctagttacaggcatttggcctagtttatttgatctatctatatttctgtgattttattgtcttttaactttttatgtgtgttcttttatctatatctttttatgataagatgtccagaagcttttttgttgtaagtaaataagataaaaaacagacacagcactttgaattccttgcctgtacttggtgttttgccaccgaaaatttttctggtgtcttggaccattggcttcattgccatttgcttgtggcttcaactctgtctccaaagttaattattaaaggagcatttctggagaagaatccatgctttctttcctcttctagtgggagccctgcaccctttcatgttgaaggcttgtcctttgccagctttagagctgcttagctgaaaagtgaaaagatgttcttaggtacatgcaaattttatagcaatttaatgttatttaatgacagtattactacattacagtggcagtgtggcaacgtaaaattagaatgaactctgtgaggaacatttctgagttagattttgtacacatttatatattataaacatgttccagactagcttgtgattatctgaatatatctgataaattgttgataacagtatattaatttcaatttgttattatctgataaattgttaacaaagctacagttaaactgttgttaacagtagctttcttggagcttgtttttaagtgtcttaaccacgttataaagtagactttttctgatgttattccatgcagtgtaatttataatttcgccaaagttagtttaccagttacctggactgtttcctagttcatctagtattttttttttttactagtcttagaaacagtgttggtgttttgtttttgtttttgtttttgttttttgtttttttttttttttttggagacagagtctcactttgtcaccaaggctgccagcctggagtgcagtggcgcgatctcggctcaccgcaacctccgcctcccaggttcatacctttctcctgcctcagcctcctgagtagctgggactacaggtgcccgccaccatgcccagctaattttttgtatttttagtagagacggggtttcaccgtgttagccaggatggtctcgatctcctgacctcgtgatccaccctcctcggcctcccaaagtgctgggattacaggtgtgagccaccgcgcctggcccagaatcagtgttaaagaaaataactcagcctgtgattaaccataggcgtatggtctttgggagtgggggctaagaggccatagctgtttttcattaatcgttatatttttataggtttaaaaactgggcatgtctcagagggcctatttattttagtaaaacatcacttggtctacatctgaacttattttaaaaatatgttgccataaaatcaaatataaataaattcatgcaagttacagaagagggaatttatatcaataaattccctttatatcccaaatataaagttgggattgactggaagggggcatgagagaacttgaacttgagggacatgaaaatgttacttggctgtttggcatttggtaacttttgtcaaaattcctcatgttgaactcttaagatctgtgccacctcactgtatataaattatacttcaatttaacaaataaatataaaccaggtccttttacttttcttgaatggcatactttggacaagtcacttaacattttttgtttacaaagtctataaacagtataactataatgaatttcactgtataaattttttcattggttagatcagtattattttctaactcaaatgtcaactgtagaaaataggtgtgtgtcaatatactctgataatgcccttcctcacagtgatttaaattttacagttaacactatgtattctcatttcaggtttactatgcaaaaaagaagcgaagacaccaacagggccagggagacgattctagtcataagaaggaacggaaggtttacaatgatggttatgatgatgataactatgattatattgtaaaaaacggagaaaagtggatggatcgttacgaaattgactccttgataggcaaaggttcctttggacaggtaatttaatggaaaatgctgaatttcattagttagaaagaacttcttagtgaatcttgttgttaacagcccttcctcaagagtgtacttttaatatttgcaaatagagctcagcaatggatatgcaagtatttggatgaccataattctttaaaggtagtgatactgcatcagtaatataaactccttagacttctaaaaacttttatggctaccaagtgctcattttactaatgactggtgaattttaatcacttaatagatagtattgcctctttgttatgggccttgtatagtctgtagatgattgttaattacatatgctagaggtatttaccttcttgtccgatagaccacttcaaagagaaaagaattaccatgttcaggtggtgcagtgggagtccactcacttttcaggaggctttggaaagctgggggttgttccctggctttttctcccacttcatgttgtaactatatcagacctctaagcaggcaggcagtcttagtctcttgtatcagtcgcaccaataccaagagttttgggtctttctccttgtgctttatttatttatttatttagagacagacttgcactcctgtcacccaggctggagtgcagtggtgcactctcggctcactgcaacttccatttcccaggttcaagtgattctcatgcctcagtctcccgagtagctgggattacaggtgtgtgcctgtaaccacacctggctaatttttgtatttttagtagagacagggtttcaccgtgttggccaggctggtctcaaactcctgacctcaggtaatccgctcaccttggcctcccaaagtgctgggatttcaggcgtgagccaccatgcctggcctccttgtatttttaaaaatattttttcgggtcaggcgtggtgactcacacctataatcccagcactttgggaatctgaagcagaaggatcacctgagcccagtaattccagaacagcctgggcaacatagcaagaccttgtctctattcatttaaaaaaaaaaaatgttagggggatctctggttgtggtcccccagctgttcccagttgtaagtccttctatcacattgagtcacagagctgtgttttgtttgaggtgtgatttgctgataatcccagtctcctctgccttgcagcccttgtggaatgagatggttattaatctgcagtccaaacttttgacttttcgatgatgaggatagaatgggaatcaaaatgacttttcctaaattgcctttttttgttttcttaaactatggaacctgcatgtgcttacttctctgttcctgccctgagagaacacaaaatacatgctcctttttaacctgtgaggaaaaagccatcatgcttaaaacagaaagtgttctgtattatcgggggaaattcagccagatatcgggcaaaattcacccccaatatttcatgtaggttcttttctattttccctaagcgtcggccggtttgagaaataaagggacagagtacaaaagagaaatattttaaagctgggcatctgggggagacatcacatgtcggtaggttctctgatgccccacaagccgcaaaaccagcaagtttttattagggattttcaaaaggggagggagtatacgaataaggtgtgggtcacagagatcacatacttcacaaggtaatataatatcacaaggcaaatggaggcagggcgagatcgcaggaccacaggaccagggcgaaattaaaattgctaatgaagttttgggcaccactgtcattgataacatcttatcaggagacagggtttgagagcagacaactggtctgaccaaaatttattaggcgggaatttccttgtcctaataagcctgggggtgctatgggagactggggcttatttcatccctacagtctcgaccatagaagacggccacacccaagggggccatttcagagacctaccctcaggggctcattctctttctcagggatgttccttgctgagaaaaagaattcagcgatatttctcccatttgcttttgaaagaagagaaatatggctctgttccgcccgggtcagtggtcagaatttaagattatctctcttgttccctgaacattgctgttatcctgttcttttttcaaggtgcccagatttcatattgttcaaacacacatgctctacaatttgtgcagttaatgcaatcatcacagggtcctgaggcgacatacatcctcctcagcttacgaaaatgaagggattaagagattaaagacaggcataggaaatcacaagggtattgattggggaagtgataagtgtccatgaaatcttcacaatttatgtttagagattgcagtaaagacaggcgtaagaaattataaaagtattaatttggggaactaataaatgtccatgaaatcttcacaatccatgttcttctgccgtggcttcagctggtccctccgtttggggtccctgacttcccgcaacactctatgtcattagcagccacaggtctaaatccagaaaaataaacgtgtaagcaaatatgaacatttgtgttagacctgtgtcactccagtgtggccctaccagtccctgatgtcacgtgtatatgtcttcttcccatgatttgaaagaattttggtaattacacataatccagggactttttccttgaattataacctctttttcttctgagggggttttcagtgctttgggagtccttttttttgttttgttttgttttgttttgttttttaagagacagggtctcactgtatcagcctggcaggagtgcagtggagtagtgatcatggttcactgcctcaacctcctgggttcaagtgatcctcccacttcagcctctagagtagctgggactacaggcacgtgccaccatgcctggctaatttgttgtttttttgtagaggtgaggtcttactgtgttgcccaggctggtcttgaactcctgggctcaaccagtcctcgcatctcagcttcccacagtgctgagattataggcctgagccaccacacctggcctgggagtccctcttgattaaggtcttcctgttagtcagaagcagcttctctgtcagcctcttaaggaaaggcatttgtgaggcccagtccttaactaagggtgtgaataccctctactggttcccaacccgggctacacagcaggaggtgagtggtcagcaagcattaccgcctgagctccgccccgtcagatcagcagcagcgttagattctcaaaggagctcaaacccaattgtgaactgtgcatgcgagggatctaggttgtgtactccttatgaaaatctaatgcctaatgatgtgaggcagaacagtttgatccccaaaccatccacctcacccctacctaccctggccgtgaaaaaattgactgctgctctagacctagagagtgctacctccgccatgaaaacttcactaacgtttgggcagttgcactcaataggtcccttttttttttttttttgagatggagttttgcttttgttgcccaggctggagtgcaatggtgtgatcttggctcattgcaccctccgccttctgggttcaggtgattctcctgcctcagcctcttgggtagctgggattgcaggtgccccccaccacacctggctaatttttatatttttagtagagatgggatttcaccacgttggtcaggctggtctcgagctcctgacctcaggtgatccgcctgccttggcctcccaaatcatgctgggattacaggcatgagctgctgtacagggcctaatagcttactttctaactttcctgacatctaccatgcaaattgtagccatacaggctgctctgtaagctgattggcccctgatgactcagtctttgtgctcatagttaggtttttcttctccccttcaccttagttttctcatactcagattccacagaacaagtgagcacaggaaccctgtgacgatagagtcctgcttgacgttgaactcctttttcccagggcagactgatacttcccctcttgggctgaggtgttgtgcagtgtccacgttgaggttcaggtcctgtccctcaccagaatagtatcttctgtatagacttggtcagactttctccacattctgtgtcaggttattgtcaaataagggatttctccatttccgtagccaatacttaccaatcctgattgcgtattgaaatttcttggggagcttacccaaaaaattactgatgtctgggctccaggccagttaaattctctaggcattgatgtaaaagaaaaaaaaaaccttattaaatttgtaattcatggtcaaaaactggcagttagcctgttaactgtttggcaagtcagtagatacttgggcccacatgagtgtcctttatcctgcagcccatcaggatctgggcactgaactgcaactcttagtgcagtcagtacatccagtgaagcagaagcatatcagaaccccttggccacatgtttacaagggtagcctctgttataaaagaccacagagagtgtcttttagaattgagtgaaaccagagattagtgcattttttattccaagtttgatttcagttgagccattcagaatctgtcacagtagatttagccttgactgatgaagatctgagaacatacgtttcatcctcttcctgaccttatggtttcatcctgcaccttggaatcatttggagttccttccccatccccaggctttttgaatgtgctagaaaatgtatctaaaagaattacttattcagacaatgtataatattataaatgtaacttctattttattagttgtaatggttgtcactggttaataagagataacattttcttttacttatatattgattttgtaatgtttatgtaaatcttttatagtagtatgaacctcgttttaaatgagtcagatttcaagtgagaggtgttgcatggtgatgtgtgctcatgaacgctgtgctttccttagcagtaattctcattttaaaactatcataatcccccaattatggcgtttgtggcattgtggaactttactggtaatttgtgtttgatttttttttagtctaaaccaatttttcttttatatacttaggtttttatgtatgaaaatctaattgaaagttagaaagttatctgaagccttctgctgataaacttttaaatatttcatacatattcttagggttcaggtatctctcattaaaagaatagttcgatgagttgttttatagtgttatttagtaagaaagataaaaaaacctaagcatttgtcaagagtcataatttatttctgaaggaggaaaatagttaatttaattttattaagaaaattatctattttgtggatatttagaaatattgtacaaatgcaaaaagaaattcaatttaaaagattgatttaaagttactgtgtaataagtggatatatattgaatagaaatagatggcatctcttctacttaggaaggtcagaaaaataattataaaaacatataattgagaattaggtaaatgttataattaaggtgaattataaattattgtgaaatttttgcaattaatgaaatagagaattattcatcttctcttttaggttgtaaaggcatatgatcgtgtggagcaagaatgggttgccattaaaataataaagaacaagaaggcttttctgaatcaagcacagatagaagtgcgacttcttgagctcatgaacaaacatgacactgaaatgaaatactacataggtaaacaaacaggcaaacagcgcagtgtgccccaacccacaccaaaactttgagttaatggttcttttctatcaaaatattttgattttattttaaagtggctgattaaaaatttgtttatttctgttggacagcaagatttatataagtgacttgatctggtagtaatagtctaaatcttggggaatgtgccttccatgtagcataccatgtagaaacaaatgagaatagtgtgtgtgtgttttttatttgcaacttactggtaccatttgtttgctaataatgatgcatgtttatccatagggtcatctttccagtaactttaaccatttctaatctagctcagaaactagttgtgagctagtatgttcttagtggttgtggaaccatttttggggcatctgcaacaagatctcaggctcctccccagtctcttcatcagcttggcagcattagaagctattagatttacaactacagaaaagagataatagccactgcttattgaatttctaccacattccttatgcttttcttccatcatctgtaataatttatagcagtcttataaggaagatggtagaatccttaagttatggttggtttgtataagaagccccatacccagggtcatagggctctgcagctaagattggaagctgccgtacttctgcctactccaaagtctgtttcattctcacatagtcttccttctgaaaacagaaataggagacagaagaattatgacaatactgaagtctagggccatttgatacatgggcaaaatatcttctagtacaccttctttcgcagtattttttaatcaaatctaatatgtcagtgattgtaagacaccatcattttatgtaccgtcaaggaaaaaactgttaagtattcatataagatgccatcaatcgaagatacagaccttaagatcagcacagagccatagtcacttgtgttcagaaacactgaccttatttgatacacgtaaggctgagttttatttaacagatcttttaagaaaacgttatgattctttggtccaccccaaaaaggtagaaacaaataatggatctttaaaaggggcaagcttcagattgtttagattttgtttgtgaaatacttctcattcctcattattaaaatataaaatgagtttctattaatttttcttagtttctttatagatactgatataattcataataataccattcttatcttaaaaccttgtcacacacaatgaaactttgctgttcactgtcagttataacttacatgaggtgacccatttccattcaagggttttagaagcacatcaaggacattctaaggatgattgacttacacaatgatctctgaacatgcctcctgccttctcctcactcttgagtatttgcttaggggagcagaaaaaatactggtagcattactgtaacattttaattctgctttatttaaaaaagacatagctggcatatagttaagtactgaaaaatgttagctactcagttatgtataatgctagtattttgttttgaataaagttgacattaatgatcatattattaattgtattagttattacagatactctttggatgagtttttaaattcttatttcagaagatggtgaatgcataacgtctcaagaaactgagattctgtttggaaaacaaaagaactttagattagacaagttcatatcaattgaattgataccttaaacttaaggtatccgaaagtcatattgatttttatgatgtaaattagttttaaagtgattgatgagtctgatttattctgatgagttttattgtcttgtctttgaactttaaaaaacatctacttctttactgtgtagccaaatttcttatctggattatttggtacctgccatggtctagttaaaagaaaatttagttgaagtcttcaacaaagtcttgccagccctccattctccccaaaatttggttaaaaagactgaacaaatatgcttgtttgagctttctttgacaatgtctttagtgctcagcacactgtagatactaagtaaatgaataaagaattgtgaggtcaagtgaaactaagtagatctttcattggacgaacattgtgatcacagagcttcttaaaggaatttttataatcacattagaattctgacagcagttactttttgcattcatttagtggcacctgcttaaccaggagattaaaagccatccacagaccatgattgtgaggtatcatggaactatgtttttagttttaaacctataaactgaagtgactaagagcagatattttacattcttaggtaacatttaaggattccttttgttatttttagtatcgagttgtgctgtagactcctatatagccatgtagttatttttattgtgttacttattctaactttagatcacctataccatgaaagatctaaaagcaatattgatgttcactgctttgaggcaggcagcccaggactattcccaggaaaacacaatgtatccacagttcttagtgatcagacattgattactatcagtttattccagatagatctgtagagaaacctctcattttgtaatactataagataaaatgaaaatcaccttgacagatgggtgttttatgtcattgcagttgtgttacaggtgctcagtttggtatatataagacttaacagggagggacagcactttatcgaataacctcatctgatgtgacgtcagtgttaatagttaaagcacaatctttgaggcaatttagtgagtattcagcctttttagagggtcaacagtgatagcgacctatgtattctatgctgtttccccactcacaagcctccttatcatctcttcttgtagctgagctttattttgaagttttccaaaccttcagtctcacacaagagttgtcacttaccaatttgataaacacagttaagtcctccaatacttttaccaaagcatgattttcagacatttgttgtatttgcctaaagggtaaaaaaaaaaaaggctatcaatgaaaattgtgacagaaaattaccagtgaaatctaaagttcagcagtgcagatacatttcaaagcctacacagagggctgccaactacagcattgtcacaaaccagagatcccagtaggtggagcttagacataggaagttgtgaggtagggctctcgggaagtaaaaagtgctttcttttataaatgaagataaaattgctgaaatattctcactgctgtttgtccatttggtccttatgttttcagatctgacttttagagaaacaaggcattttggtagcactgcttaccttatatcacttaccgacatatgctgtacctgtttaattcagcagaagagcaacttagatattcttaactgattgaaaactgctgttattacaaaatgctgatctccaaactttaactgaactctgcatttgatgtaataatgttatagaacatttgagagtgcatgtgtttgttactctcagtttattggtatatataatttaaaatgaaactgttttctctttcagtgcatttgaaacgccactttatgtttcgaaaccatctctgtttagtttttgaaatgctgtcctacaacctctatgacttgctgagaaacaccaatttccgaggggtctctttgaacctaacacgaaagtttgcgcaacagatgtgcactgcactgcttttccttgcgactccagaacttagtatcattcactgtgatctaaaacctgaaaatatccttctttgtaaccccaaacgcagtgcaatcaagatagttgactttggcagttcttgtcagttggggcagagggtaagtattatttcagaacttgtgaattaaatagaaattaaatagaagtaggtaggacagtgtaggtattaggttggcgcaaaagtaattgcggttttcgccattgcagttgctgtttttgcagtggcaaaaaccgcaattacttttgcgccaacctaatagatatttgaaatgttaataaggtgtataccatttagaggcaattacaggatgcttatttatctttaaaatgtagcacttaattaccttgtgttgatatctattttggggaaataccttttaaaatgcaaatagcaatactttgagtcaaaagacattgatttttttgaaatgggtatatttaaaattgtatgtatgctaaaagattaagggagagaataggagatggaatgattaaatattaggggatttgtaactatatttcccaagtaaaggttttagtataaattttgggactttccagtactagaacattgaatctttgctgtaaaatacttctctgaagatggatcaagataaatcttttttctcaaaaactgatggttcaaaaaaatgcaggtaattttgcattagtcatggtataagtatagaaaattcagttgatagacttacttgttttgataaataagtttgtcttattttccccactcttatttaaaatttacataaattctgacacatatccaagctggtttttttcagactgctaaaaacagatgtgttcgtagtgctgataagtttagctgatttaggaaagcagttttttcctgtcattcttccagcattatgaaaactactctaacagcattgttttatgtataaaatagaagtgataggggtctcctcttgaaaggaattagtgtcaccatttgataatattttactcattttaagcactattctttttgctttaagtattgaaactatatttcttctgttttaaagaaacccggctaacatacagatgttaatttttcttactgacttttctgtttcttatttttccaaattagtgaaattttctgtcccgtcctacttttgtccaggttttaactataacagattaatttaatcataaggatttatagccaattaataggactgtctttttgttattttctgcaacttctcatggtagtgaggctatcaaatgttaaagtaatttttaaaaattggagtagggagcaaagtttgcagttttagatgccttcaaaaaatcaagagatgctcgtagttaatatgtggtagagtatattgtgaatgaaaaatacatgcccatcttgacagtaatttgaatagattatagagttgggaaaatttccccctatttaagccaaattatgtattttgtcctaatattaaacattattatttctgtctagccaaaatgagccagttatccctacaataagtttttaactattcaagttcattggcatcacatgggaagttatttctaaaatagacctgcagtggtcctgcccctagatctgttggattagaatcagaaggtggtagggcaagtgtgttttggggaaagcaactgctttaaacaaattagatagggaggtgacaaagttcttggcataagctgtgaaataaaagtctcaggagtggtgagtgtttgggcctagggagttaacaatggtattggcttataaaaaccatggaaatgtaatacttcttcccagttcttttaaattagactttcttctcatagttccttaaggttggttgacctacctgtggaggcctgagattgttctcgaagacttggctggaggtttcagtgggaaccacagaaaatttcatgagctttctggctgcatggtttgggtgttaggaaatttagttaggattttatttcttttccacttttaataagtgaaacaaattggtctctgaagacatcctaacattacttcattgaaaatagtccatttcaggattgtctttctataagaagtcttggatggaggtagagagagaagatgagagaagaagctattggtcagagacagctctcaattgaatctttatgtggcagtgtttctgggatttatctgtgagacagcaagagtacaaatatctgaattttaaattatattatattgaagttacttgacttttaacgctgagaaatacattgtttgggttaatttaaatactatttagttgtaaagttagtggtaaactaagtgccagccatagtaggaagaaataattattagggaaatacattgctttcaatagtgttttttttttcctagtgaggcataattgttttaagaaatatcatgatgactaggtaggattagactaaatgaaagggcttgaatctttacgtattatgcatttcacagtcagattaaccaatccctcaaaatgtttagttctttaagccgtattcgtagtctaatgttgaagttaatcaatggaaccctaattcaggaattagccaattcttttctgttaatatcagatcaatgtttttaatccaatgctgactgcagttttaagcaattgaagtaatactattttgaaatatatttcagatataccagtatattcagagtcgcttttatcggtctccagaggtgctactgggaatgccttatgaccttgccattgatatgtggtccctcgggtgtattttggttgaaatgcacactggagaacctctgttcagtggtgccaatgaggtaaatgatgtattgctttacaaattctgttttcataatttctttttgtctttcatctgtgacagtgtaatttaaaagttgtttttaggcaaagatgtctacttaatcattcaaatgtgaggtcagtttgaatatacctatttttcatatttgtcagttgtcatgtaagtttagaattatgagataggagtaggatattttaatctactcatgaaggagaacagttagaaagtgttaagtattttggcatacattttacaggttttaaatacaatacagaaagcttaaagatgataaagaatgaaggccatcctgaagagtgatacaaacatcactctaaattttgagattatgatttggagttgaagagtaatgatcagtaggactgatggatactcagtctgaataatgtagagtaaacgagattatagacttgtagggctacagagactgtgtgcagttctgaagtctacaggttttcagtctgtgttctggaagatttttcaaggtcagaggcagtgaatgggagggcagggacaggccttaacttccctgcagtcagagaaattagactttcattgttttaaaaactacacctgtggggttttgtttgttttttaaaagaaaaattgacaatttgcacgtcttgatcagtctatttataaatgagaagagaaaggccaaaggcattaatgacttgtaccggattacacagctgttaataggtggtgtcagaaacttgtttcttccatccttccttttaattcttctttttttttttttttttttttcccggagatggagtcttgctctgtcactcaggctggagtatagtggggcaatcttggctcccgagtagctggaattacaggcaagcgccactatgcctggctaatatttggatttttactagagttgatgtttcaccatgttggccaggctgctctcgaactcctgacctcaagtggtctgcccgtctcagcctcccaaagtgctgagattacaggcgtgagccactgtgcccagccccttttaattcatttcaacttgaactggtgagctactcttttatagtaactgtcatagtttgtttttttttttagtataaatcttactgtgtaaattagtatctttcttgggcttaaacaatattaaaaaaactttgccatgttactcattgtaaaggccgaggtcctttgagtaacccacagattcctacttcctctgatgccagttctctcaccaccacctggtctctccttctcccctcactctgtggtcccttgaaaacgccagctacaggcccatagccctttgtatttcttccttcctgtgcctaaaatgctcttttctgagatactcctttgctgatgttagtgtttgctctgatgtcacattctcggtgaaaccatataccccacttacggttgcagtaccccttctcctcatcccatagttcttagccagcatctgacatcatgtatttaattatttattgataatgccgggcgcagtggctcacacctgtagtcgcagcactttgggaggctgaagcaggcagatcacttgaggtcaggagttcgagactggccctgccaatatggtgaaaccccgtctctactaaaaatagaaaaattagcctagtgtggtgttgcgtgcctgtaatcccagttacttgggaggctgaggcaggagaatggcttgaacccaggaggcagagcttgcagtgagccgagatcacgccactgccctctagcttgggagacagaacaagactccattaaaaaaaaaaaaaaattgtgtgtttgtgtgtatatgtatttgctgtcttcccactataacataaacttctttttggcaggaatttttatgttttgtttattattttctaccactgaatatggttcctagcatataataggcacactcatttaaagtacttaaaaaagtactttattaggtccatactttattaagcctctgggattttgtgtgtgtgtgtgtgtgtgtgtgtgtgtgtgtgtgtgtgtgtgtgtgtggttatttaacatgctctgaaaactgggttgggtgccgtacctcacgcctgtaatcccagcactttgggaggtcaaggtgggaggattgctttatcccaggagtttgagactagcataggcaacatggtaaaaccccatctccacaaaaacttttaaaaattagctgggcatggggccgggcacggtggctcacacctgtaatcccagcactttgggaggccaaggtggacagatcatttgaggtcaagagtttaagaccagtctgaccaacatggtgaaaccctgtctctactgaaaaatatgcctgtagtcccagttactcaggaggctgaggcaggagaattgcctgaacctgggaggtggaggttgcagtgagccgagattgcgccaccgcacttcagcttgggtgacagagcgagactccatctaaaaaacaaatagccgggcatggtggtacatgcctgtagtcccagctactcaggaagctgaggtgagaggatcacttgagcctgggaggaggtcaaggctgcagtgagctctgagtgcaccactgtactccagcctgggtgacagagaccctgtctcaaaaataagtaaataaaaaaaatttttttaataaaattctcccaaaacagaaactttaaaacttcctctcatctttccttactgttcaacattgtatccatggctacctgacataatatgtttgttaattgactgtcttcccttctgtggggtatttgactcaaggaaggtagggcctttcttgtgtttgttcattactgtatgctggatgtctagaggagtgccagacacacaggaggtgtgcaatttatttatgaatgaatgacttgatgagcaggagtagatgtacagtagaaattacaggttttgttgtttttatttttaatacaggtagatcagatgaataaaatagtggaagttctgggtattccacctgctcatattcttgaccaagcaccaaaagcaagaaagttctttgagaagttgccagatggcacttggaacttaaagaagaccaaagatggaaaacgggtaaaataaggatatatctgttttgagcctttattaaatttctttatcatacctgtctttttatagctcattttgcatttacttgaaatcagtgtgtttcagttaacgattttattgataccttacatagatattttgttcagaagttgagtatagtttgacctgaactatcaggtatggaccagtgtttgattaatggtcagagttatctttaaaacttcatattaaaaactgtatgcctgcattttgaggcagctgatcacatcaccatacttggtttcaacagtagaattaataaatttgatctttgtttctcacagcttgggcatgtaatgaggtcacagttaatactgcagctgtgaacagaagtcacaattggagtaaatgattttttttttttaagttcagttggtaaattatgtcagaagatgatttttggcttaagtagtatgtgatttttttccaaggatattaactgactagatggtcctttgatagacttcagattcctagctcattgacttggatagcaaaaatttcacatctccaaaatcttttaaagtgaggtttttaaaacatttggtttgttttagtaattttcttttatctgaggactttttaaaagatacctaaactatgtcagtttaatagagtaaatgatgccaattttgcatcttgattttttacttttgttttatagatctgtaaataatcatgttttgtaatttactttggtcctagtattgaatgaatgtaatgtataaatatgtgattgaatatgacccccacacacacatgtacatacagaagtcaccttgagatcatagttttgcattttataacatttaagagtttatttttgtttcagttattattttgccttgtattttagcggacgctgccaccaggtgtcattttcagtgaactgaagatgatggttgatcgccttaattcacctccacacagctatggagtcataacttttaatatcagatgattttctttagaatatttaaaagcacatacgtagttgtatctttcaaaactgatttgtaagttcttgtgttctgccatattcactaaagctataggcagtgcagtttccagctgctaaattatgcctattccccataaggaaaggatggaaaatgccatcgagacctcctgggctcttgttttttctttacccacatagctcattaatcgtggcccattttccatgtaaccaaaaacttagtctgggaatccttactagcttcaccagcatttaaaggcgttcctaccagtttgaattagcatggagaggaaattaaatcttttttatgttgtctctctctgtgatacaggctgctgctttctccatttcagattgatttatttatattttgcttctgctattttttttcctcaataaaacatcccattccatctcctaaatctctgccttacaaaaaccacagtgacctatcatttctttcaaattgatctataggtattactatttttagttatttggggtgggggcatttcagaaatgagtagattgtcttttcccttttaaaattggaagtggatatcttaacatacatttaatacatgtgaattaactagatttttatgagatttattttagtcgcacttagcaattgacttaagcaacttaatttttaaaaatatgaaataattattttgcttttaagagataaattttgtaacaaaaagtcaaattcataatcaaataattacattacaaatggtacactaagaattttgactagagatacaaatagatgtgcatatactttcattggctatctctttgtggtttgtttactgattttatttttacttttaatttttcattttacatttcaaaagccccatattagggttttccaataatgaaataaatactatatatttttttcctggtggaggtgcagaatgaagaagacaataaatgatgctttttttgaagtacagtttatataagatacatattttaagtgttgagtttgttttcacctttgtgtacagcagtgtcccccatctaaaccaatatgaaagatttctatcattccaaatcctcttgtgaccttttctgttatcccactactttctgatttctatcatcaaagactagctttgctttttcattggcaaacttagtataattggagccttatagtatttattgtttagttttgggttttcttcactcagcaaatgtattgtttttggaaaatcatcaatattgtatgtctcaggaattaatttttttttattgcttcaacatatttcattgaatgaacatgccataatttatattcacctgtcagtggtcatttggtttgttcccagtttgggactattatgaataaggctgcagggaacagtcttttatacatatgttttcatctctctgacagcacagtctaagagtagaattgccaggtcatggggtatgtgtttaccttcacaagaaaacaccagttctccaaagttgttttattttatattcccatgatgtatgagggttccagttgcgtgacatcctcaccattttgtatggtttgtctgttgggttttagccattctgtagtggatatgtagtggtttgcatttgcatttcttcatggctaataccaccttttcatatgcttattagcctttcatacatattctttgtcacaggtctttcccatcttttgcttgtgttactgggttgtttaataattgagtagtcctttgtcattaagttttttgtcacatgtatgtcagtgtatttccctagactgtggctttgccttttcctttcttaatatggtatcttttgatgaatagggagttttaatattgatgaagttgtatttgtcaactttttttgtttggtactttttttatcctgaaaaatctttgccatctccaagtttgtgaagatattctgtgttttcttctaaaagttttttatttttattttttagtctgcttttacagttaggattctgtggtccatcttgaattaatttttgagcgtggaacagggtgaaggggttgaagttcattttcttccatatgcttacctagtagttacagcagcatttgctgaaagcaattactttaccctgttgatatgttttctattctaggtcctttcttttcacatatggatttttagaatcagcttgtaaatttctaccaaaaaaatggtgctagcattttgatttgggttgcagttgggattgcattcaggaaaatggacatcttaacaatattaagtcttccactctgtaaagatgggttatctctccatttatttagggcttaaaatctctcagcagtgttttatagtttttaatgcagaagtcttacatattttgttcactttattccttagtttttaattttttagatgctattttaaatggcatttaaaatgtataatttcataatttttcatttttggtatacagaaatacaactgatttttgtatattgattttgtatcctaagaccttgctaaattcacctattctagtacagttgacccttgaacaatacaggtttgaactgcacaggtccacttgtatgcacatttttttctgacaaatagagtcagccctctgtatctgaaggttccacatctgcagtcaaatgtggatcaaaaatacagtattccctggatgtgaaacctgtgtatgagggccaacttttcacatatgtgggttccgcatggcctccttgtggagcttgagtatgtgtggatttcagcatatttgggggggtcctggaaccaaccccctgcgtatactgagggatgactgtatttttgttgttgaaatttgatagggctttgtacttaaacagtcttaatgctccatgaatgaagacagttttgttttttcaactgtatgtcttttttgcttttttaatatcatgagtgggttttgaatattgtcatgttttttctgcacgtatagagatcatcatatgatttttctcctgttttgtggtaaaatgcattaattttttgaatgttaagccccaccctgtgataacctacacttggccttgatatactattcccttatatatattgctcagttcaatttgctaatctcttggtaaggaattttgtttctatgtcattaatggatatttgcataacattttattaataaaaccatcattggggtttgattttaggattgtgctggacttgtgaaactattaggaaatattttttcttgattttctgaaaaaatttgtatatgattggttggcattatttcttttgtgatgtttagtagaggtcattgatgaaaccttcagaacctgcgacattttttgttagaaggttatttaattataatttatgttttttgatgaaaatatggttatccaaattttttttaagttagttttggtaagttgtatctttcaagaaacttttctttctcatctaaattgttgaatttgttggcgtaaacttatcaataatattttactataatttttttttaatatctagagaatctgtagtgatagtctctcttttattcctgatattggccatttgtactttctgttttttccgcaagtagtcttgcctcagggttgatcaagtttattaatctttgcagacaaccagcttttgactttgttgatttcttttttttttcttttctttttctattcttgatctagtttctattctgttttttgctcttcattatgtccatttacttgggttgaatttactccttttccagcttcttaaaggtggaaactagatcattaatttttaagcctctttgctactatagaatttaatggtataaatttccctccaagcactgctttagctgcattctgcagctttttatatgttttttttgttgttgttggtttttttttttttttttttttttaagacggagtctcgctctgttgccaggctggagtgcagtggtgtgatctcggctcactgcaacttccgcctcccagggtcaagcaactctcctgcctcaacctcccaagtagctgggactacaggcacccaccaccacacccagctaatttttgtatttttagtagagacggggtttcaccatatgaccaggatggtcttgatctcttaacctcgtgacccacctgccttgtcctcccaaagtgctggggttacaggcatgagccaccacacccggccactttttatatgttttaacagtcattctgaaatgtttctaacttgtgatttcttctttaacctgtcattagaattttgttacataatttcaaaatatttgaggattttctagatgtcttattgagttctagtttagtagcagtttggtcacagaacgtgattttagtcctttaaaatcgagacttgttttatggcctagcatctaatgtgtctttgtgaatgttttatgtgtgcttgataagaattgtattttgtgtttgtttggcgtagtggtctccagctatcaatgtagatcaaattgtttgatatttttcttcatatcttttatatctttgtgtgtatttgtgtatattctgtcagtaattgagagaagagtcttcattgataagtttggatttgtcttagactccctttgtaacattgctttatggtttttgaagctttgttaataggtatatgcatgtttgatattgttacgacttattgataaattgacccttttatcatcctgaaatgtccctctttgtctctagtcatgtttgtctttaagtctgctttgtccgatatcactatagtcttaccagtgttcttattcttgatattttcatggtgtgtgtgtgtagatatgaaagatatgaagaaaaatatgcaacatgtgtagacacacacacacacacttttacccttttactgtaaacctgtgcctacctttatatttaaagaattatttttgtgttgtgtgcaacatatgatcaagtcgtttttttaatctagtctgttagtggttaacccattattcagagttttgggtttaagacttgtcttatttgtgttctgtttgtctttcctgttctttgtttcctattccttctttcctgccttttgcggggaggtttgttgaatactttttggcattttattttatctcttgtactgatttttttacttattcctctatgtgtcatgtttagtgttccttttataatatgcacgtttaacattagtttaccttcaaataataatatattgcttgttaaacagtgtgataaccatgtgattctatctacctcttgtgcacttgttgtattacttttgcatgttataaacctcacaacacattgttggctgtttaaataaaaaatagatttaacacaaaaaagaaatttaaaaagacataaaataaggataatagatcttttatatttatccttatatttgctcttttctggtgttattcattcctttttgcaattcctagcttccatctggtattatttcttcagcctcaagaccttcctttaacttttattttgtaatgaataagctatcccgataaattctctcagcaggtgttgatctgaaaatacttgtttacctttattttttggaagatattttcagtgaatatagaattatagattaacttctttctttcagtgaaagaaaaagatgttacgatatagcttaaagatgtattgactttttttctggattacactgtttcggtagagaagtcagtggttattcttagcattgttcccctgcatataatattttccccctcttccctctggctgattttaatattttctctttgtttgatttccgcagtttgactatttacctaggtatgattttctttgtattttttctcctgggagttcactgagtttcttggatctgtgggttgatctctatcatcagtttttgaaaatcctcagatacagtcttgccaaatatttgttctgctttcgtctttcttctagttctccagtgatgtgtatgttacagtgctgaatattatcccagaggtctctgtctggtttattcattctgttttctgtttgtgtttttaatttggataatttctttttctgtcttcttgttcactgatttcttttttttccttgtgctgagtccagtctgttgttgaatccattaaatggattcatgtgatgttattgttatttttgagacaggttctcactctgtcacccaggctagagtgcaatggtgtgatcatggctgattacagccttgacttccttggctcaagcagttcttctacctcagcctcccaagaagctcggactacaggagtggtgcaaccaccatacccagctattaaaattttttgtaggaacggggtctggctatgttgccttggctggtcttgaactcctggactcaagcagtcttcccacctcaacctgggtgtagagacatgagcccagcctatattttttagttctagcatttctattttgttttaaatatagtttttctcttctgaaattctacatctattcatatgttgtccacttttgaactaaattgtttatcataatttatcagaagtaatttatcataattattttaaagttccagtctgctattttcaacatctgcaccatttatttatgtgtatcttctattgggtttttttctttcatgtgattgtggacgtcatttttaaaaaatgtttgtaatttttaaatgtgtgacaaattttctttgcttaagaacagttaaagatggaagtgagtcatattttccctcagaaagaggcctctcaactctgtcaggcccctcatgtggggctgagttgatctcttttgtagcttagctgactctgggctttgcttgtttgacttagattctactccccactgttttcatatgttttgagctgggatcaggacattcccttcagcagtgtttgtgtctttagaatcagggaaaatctagtggtctctatacattactgcccagtcagcagccccactcctaactctctgtgcctgggagatcgccttcctcctgctgtactgccccatccttctgtctgtccactcctggccgtcagaagttggttcagacttgggctggagtcttctcgctcatctgtggcttacttgcgccttctcccactgcaggtctcttccaggagaggcttttcattttgtagaattcaggagatttttgttccaactttggatcctcatacagctctctgatgggtctttaaaaggcagtgattttatgacttattagaggaggaacaatcatctcacacatttctgcattgtaacagaagtcaaagtctggtgatgctattcttaaattcaatatttatagagatcttgagggttatagtattatctgtcaaaaatgagttttcaggaaatctcaacacacgttagtttattattacatagattttctaaagggaagcatacataattttctctttttctaccatgagcaggtagggttaggccagtgcctttttatgtagaacatccttggtgtcattgccatagctttcttgggctgctgttgctgaaggaagtgtaacaggtgctgcgggtgcacagttaggtaggaaagaggctcccagccagggtgagcaggggcatgcatgttctctgtaaaagatgagagaaaatgcttttagccttgtggacctctgttgcatattttttgtttttggttgcttgtttttacaacctttgaaaacagaaaaaccatttgtagctggagctgtagaaaaccaggctctggatcaggccatagtttactgacccctgggctaaatgatctttatagccatttttggtctcagaattaatgttgaactgtaactaccatgcatttgggatagtaatgtgtgaaaaggcagaggatttaactatgaagtgtcctttttaataaaggcctcaacatatatatttaaacatatttgaaattcaattatgtgagtgtttacgtattccaccaaatttagagaaagcctttcatcttctctcttacaggagtacaaaccaccaggaacccgtaaacttcataacattcttggagtggaaacaggaggacctggtgggcgacgtgctggggagtcaggtcatacggtcgctgactacttgaagttcaaagacctcattttaaggatgcttgattatgaccccaaaactcgaattcaaccttattatgctctgcagcacagtttcttcaagaaaacagctgatgaaggtacaaatacaagtaatagtgtatctacaagccccgccatggagcagtctcagtcttcgggcaccacctccagtacatcgtcaagctcaggtctgtgctgctgcggttagattaggcttgggaatgttttgtgttttctttatgaagtgggattattttaaagtgttgattaaatttgttaatagagtggggagcagttactttacttaaatctgttctttgtagttagtagtaaattcatctcccccaaagctccaatatttagttacgcatgtaataaaatctgcttggcagttggaaatctgtttactaaccagcattttaaattacttcttaaatggaatttttgtccacattgcttgagttttcccctaccttaaccagacttcattgtattttagttaagtggtggacgagagagaacctggttttagtcagagaatatgaagactttgtgatatactttcaagttaatattagagattttgtatgtgtgtgtgtgagtactttcagttttaatggtatagcttcagagtataaatttgaacaaaatgaattttaaactcacagttgtattgttttgtgttgtgatatttcaggtggctcatcggggacaagcaacagtgggagagcccggtcggatccgacgcaccagcatcggcacagtggtgggcacttcacagctgccgtgcaggccatggactgcgagacacacagtccccaggtgagctcgcacgtggttcatttgcttgtgtcacctgccattctcaggtggagcagcactggatgccaggtgcctttagaatgaccgtatcatttaccctagaggttcatgacgttcctgtctaaggaaatgtaagtatttatcatagagaagcacattcttgcagttttcctcctccttgtctagaagtggctaacacttattgggggcataacagttgttgttttgaacagtttttttcctgtgtttatctcatttaccaaagcagcgttttgagcctcatgcttttttgattcccattttacagtggaaactgagacttcatgggctaagtaaatttccctgggtcatgatctgaatgactcgactctgcttcctcccatgattttttagcatttatagtcctggattctgaatcaatttctgatttgattttagcctttttgttgttgttttgtttgttttctgtttttaaacctgttgaagaggatctaattaagtactttttcaaaattggagtgaagcagatggtgatggtaaaaatatttaaataatctaataaagttgtaagttggttcataccgagttttgcgtgatggtgtttgaaggtgagaggccagtgtagtatttgatggatgagtaaactgctgttgattaagagtgctctccattcttgtgactagggcagctgaatggtgctggagaaaatcccacatgcagctgtttgtcagcactgttaatactcaccaacctctgctgggcagtcttacatgttttccaagttgtcccatcctctcctattctctttaataatagtttcaaacttttctactcttagaaacctttgccctccccttctctgttcttacccactctttgctttgtaaggaaaagagtcttcagacaggaactctctccactttgtaacattgaatacatgatcctgcctatgtgtgcactgtccacttctcctctaccccttttttgttagaagcagtgtgtttctttctgcctaaggccaagcccactcattgccctgatcccctctctcctgccatcatgggggctttgccctttggtctccctcagctccggtgtcttcactctctcctcttttggctttttctgttgatcagcatttcctcatcctcaggcctctcccatcttaagcagcacctttgcgtgtccccctttctttccctatacttctgctacctgtggtctttgtctctttaccctgaagacctctttgcttgttccacttaggtcctgccctccaactctcctgccggtgtcagcggtgacctttattcatgggtccagtggacaccctaatgctgtctttctgcattctacaacttcatttggcagtgttgacttttccccactctttgaaacactcactgctggtttccttggcaggatgttcttctttccctccccccaccccttttctttgccctttccttcactgtctgtttcgttttttttcttctacccagcactgaaacctgggtgttcctcgaggcatgacctgtgtcccttccctactccgcttaatgtttcctggatgatttcagccacacctgccagggcctgcagtcaccatcctcatgctagttgctcctaagtcttgacttctgacttagacttcacttctgaacccctggggcctttctaattgtttactataaatgtcaccttgaaagtctcaacaatatgtgcacacacagcacataaactgaagtcatcattttcacttccttcccaacgcttctacttttgccattctttgtaaaaatggccctaaatttacccatttgctcaagttgtaaatttgggggcactcctctctccctctttccccacactgaatcagacagtaaattatctggattcaccacatcttaatacgtttttattctccacctttcactttacctcattgttatgacttgtcttattagaatggagtgtctcattccattcacctgtcagcaccattctcttccctgcagccaagtgagctttcactaaagtggtctgttcttgctattttccctactttttttctcccctgctgagacggagtcttgctctgtcgcccaggctggggtggaatggaacaatctctgctcattgcaacttccgcctccctggttcaagcgagtctcctgcctcagcctcctgagtagctgggattacagacgcacatcaccatgctggctaatttttgtatttgtagtagagacggggttttgccacgttggccaggctggtcatgaactcccgacctcaggttatctggccatctcggcctcccaaagtgtggggattacaggcatgagccactgcacctggcctgttttccttactttaaaccagttttgacttgcccttctacctgaagtgaaatgtagacttattatcaaggcgtcggtgctttccaggatctggtccccaccgaggccattctttctcctcttcactcaccctagtcacactaattcatttttcactttgtgtaatatgccacattctctcttacttttcttacatttcctgtgctctcagcctggaacactcttttcctcctccttttgttttggtaactactatttatgcttcaggtcttaagtatcactactcccaggggctctctctaaatctttagaccatccgcctgtcttgtcttcttccctttctttcttccagatctattccataccgcaaacacatacaagagtagcataagacaccgcgttcttcccacctggatttcacagaggtcaagattttgcttcaaatccttttttgttacttaatttttgagtggttgatatagtcacatggttttaaaaataagtaaatataaaagggaattcagcgaaaggttttccttccttccatgccttctagcccctcaatttctaaaccagtgttattagtttattagttttttgtatactttttgagatattttatacatattcaagcaaatacaaatacatattcttcatccaccctttgtacacaaatagtaccataccaggcaaacgctttcagaacatcttggtttttctagtcttgacatatattttggagcactttctgtatatcagtaaatagagagctttttcattcttttatttatttgcacagtatcccgttgtttagatattccataagtcttttcaccattcccctattgtttgtttattcatttttaaatttatttttagagctagggtcttgctctttagcccaggctggagtgcactcgtgtcatcacagctcactgcagccttgagcacctgggctcaagtgatcctcccaccccagcctcctgagtaactaggcctatgattgtgtcccagcacaccctgcagtgaggtctcactatgtttctcaggctggtcttgaactcctgggctgaagtgatcctcccacctcagccttccaaactgctgggattaccgatgtgagccgtcttggccaccggtcccctatttattaatggacatttagttcatttccaaccttttttactatttacaaatggtagtttaataaataaccctgtacggtagtgtcccttcttatccacagttccagttattcagtcagtcacggtccaaaaatataaagtggaaaatttcagaagcaattcgtaagttttaaattctgttatgagtagcacgatgaaatctcatgctgtcccaccctgggcatgactcatcccttcgtctagcatgtccacacagtagataagttactttgctttgtagccatctagattatcagatcaaaaaacatagtatatagagggtttagtcctctgcagtttcaggcatccagtggggatcttggactgtatctcttgtggataaggaggcaccactgtacatgtctcattcacacatagacattttatctgtgatataaattcctgaaagcagaatgactgtttcaaagggtaatgtgatttataattttgataactattgccagattgccccccatgtgattttctaatccagtaacttgattaacttcatataaaaaccatatagtattttctgagaactcactgccagcttttctactgattgttttcagtagtatctcttaaaagtttggttctcagaccacctttgttgaataaacccttaacaatttgtgccagccactggatagagactgagccttttgccttcctagagcttacagtgacacaagtaaataaaatgaacatgaagaaaaatggcaagtagcattagctgttaaaaagaaaataaggataatttggtagagaaagactgtttgttggataggatgtattaattagaataggccaaactctgatataacagacccccaaaatatggtagcttaaagagtaccaagtttccttcatttttgtgcaacagtccagaataggtgttcaggttagtggctaggccgtcttccaggtcctgatctcctaccatcttgtggttccaccttgccctagggcctacttgtctactgtgtccagcaggcagaaggacttgggaggtattatcttgtgtgccaggctagcagtgacacaagctttcattcacattccattgacagcttagacatatggccatcagtaagtacaagggaggctgggaagtgttgtgtagccatgtgctcaggaacgagaagaatattgtgcacaaccagtagcttctgccacagttgttgaggcagcatcagccagagtggtcagggaaggctctggaactgaagcgatgaaaaagagacatccaagcaataagaaaatccaagaaataacatttctaggcagaagggagcagcgtgttactagtacactgaggcatttgagagattttgacccaggggaggaatggaaggcaggtcttctttgtttggaactcaggtagccagggataggatgggtggagaaagaggttagagaagtgggcattggccagatgatgcagatcgttgtatccatttgggtttattttgtttttctaagtgcagtgagaagtcattaaaggattttaaatagggaagtgattggatttgtgttaagaaaagattgttcctgctaccctttggagaagggcaaggatggaaacaaggagttcatttaaggggctgttgtgttagcgtaggcaagagatgatggggatgaagagaagaggccaaatttggaatctgtttcacaggtagactcataagttcttgctcatgggttggacagaggcattgttgagcagctaggtagatagtagtcctttattgaaagaagaaagatggagagaggaaggacatgagggaaaagtaaagacttccttttggacctgcccagaatactgtccagcccttttcaggaaatatttgctgacccctggcataaacagggctcccaaggaaggacagtggctagtgaaatagatgaacctatttaaggatataacttcctaaaaattgcagctttcatgatgaaattttttgcccttgaatgtatttgggattttgtgttataaaactgtcttaacacattaaaagtttcaaaaaccgtttccccctgattaatatgatgctagtttgttagtgtcatggcttttgatggaagattaaagcttggaaacagtcctctgaaaaatccttttaaaaatctgttctttcaggtgcgtcagcaatttcctgctcctcttggttggtcaggcactgaagctcctacacaggtcactgttgaaactcatcctgttcaagaaacaacctttcatgtagcccctcaacagaatgcattgcatcatcaccatggtaacagttcccatcaccatcaccaccaccaccaccatcaccaccaccatggacaacaagccttgggtaaccggaccaggccaagggtctacaattctccaacgaatagctcctctacccaagattctatggaggttggccacagtcaccactccatgacatccctgtcttcctcaacgacttcttcctcgacatcttcctcctctactggtaaccaaggcaatcaggcctaccagaatcgcccagtggctgctaataccttggactttggacagaatggagctatggacgttaatttgaccgtctactccaatccccgccaagagactggcatagctggacatccaacataccaattttctgctaatacaggtcctgcacattacatgactgaaggacatctgacaatgaggcaaggggctgatagagaagagtcccccatgacaggagtttgtgtgcaacagagtcctgtagctagctcgtgactacattgaaacttgagtttgtttcttgtgtgtttttatagaagtggtgttttttttccaaaaacaaagtgcaaagctgcttgaatcaggaggagattaacacactgaaccgctacaagagggcaaagctgattttttttttaacttgaaaagattgcaaagggacattgaagtgtttaaaagagccatgtccaaacccatcttcatggatagctcagaggtatcctctttttgctcccccattttaacttgccacatcccagtcacagtggggtttttttgtctttctattcagcaaaagttaatattcagatgttggtcttggtcatttgccaactaattttaaagtaaaaggcactgcacataatttgcataaagggccccatgagggtgttttttttttttctttttgtcccccccatccccctttttttttgttttgttctgttttgttttgggtgggagggtgggaaatttgggtttttaagtcctctaaacacacttgggcacggaaatgcagtactgtaaggaagagggacctccagcttccacaaacaccatcttcagctgtatgaaagggacggttgtggtgaagtttgtcaggcacagtaagcatgctgagtggcggggatcagaactctcctatctgaacctactgaggagcaaagcagcaattacatgggatcctgtggctctcccgttgcagaggccacaggaagataggatggaacgtgactggtctcctaaccaaggtgcactgagaagcaatcaacgggtcggtcgtggccagtcctggggaggtctgagtggtggtctttgggataacctttggccttatggatttggactcgaaattagaagagcctaccatttcagatgcaatcacttttggacatgcttttgcagacagtccttaatgctgaaaacacagagaatgggtaattcaagaggcctttcttttaaaatagacttttgtgacccactaattgtaaggtattgcaaggtcactttgcgtgtgtcataaagttgacttccttattggttgaaggtcacagaagtagtggtttgctttgatggaaatagctacagctgtgtcccttcctgctttttactttttcttttgctttttctcggcacgtggtatctccaccatttcttctgcacaaagatgtcttctgttcatcctgaacatttttaaaaaatgcagaattttatgtgactgcttttttgcctcacaattatgctgtgaattttacaaaaatttattttcttttttgataatttattgtaccaaagctgtttttatagcacatagatgtctgtaaccaataatgtagcagttctgcactttgacacaaggtgtaactagaccatttttaaatgtcagttgaaaattatggctgtactattgcttaaacaaaactggaactgttgttgaatccatagccaatacatttacagcaatctgtgtactgaacatagtagattgacatctaattcaagattacaacatctgttacattctaagtgtgttcaggcttctgaaggtaaagggacactggatccagaagctatggaaccagcagttgattcttgtattcctgattaacctacttgtaaacttgaaagcaagaccttgattgcaccaacaggtccagagtatgagtgcaagcaaagcagaactctcatgcgtgacctgagcagacaggctggtatttaacaggtgcctcgtgttgagattacgctgccttaatgtaacacagtctggcagttgctaaatttgtgttcccattttaaattgaccaattttggggtgtgacacttttgagcggttgaattgggagaatgaagataagtaatttacctgtccaggatcaaaagaagcctagaaaagaagcagtaatctacctctgccgataacctgtttaagatgactcagcagaacaccgcgtttcattctattggtcaattccatgtggctgactaggtcaattttttttctgaacaaaagcaggtttttatatgtaaacagtgagaaaagaaaggctaaacactatgtaaatgtgaatggaaacttggaaatactcgtttttataaactacaaaaactttttgttgtttatcaggaaatccatatttattttgtaattaactgtcaagcctgtggatgatttttttgaacttggtagttcataaaggtttacagtgaataaaaggatatcatcttgagtatagcaatatcaaaaggaattcagtagttactgctgtttaggaatataaggttaagatatcatatgggtcaggtcattttttttttctgtgctggttgccacatcttagcaagcaccaaaaaactaaagcagtttttaaaccgatatttacgtaaagaaaatcataaaatccaatgcttctgcatactgtgttatgttacagtccagttttgtgtgctttactacacagtttggttacaggacttctgtgcattgtaaacataaacagcatggaaaaggttaaatacctgtgttcagattgtaagatctagtccggacttgctgtgtatattgtaacgttaaatgaaaaaagaacccccctttgtattatagtcatgcggtcttatgtatgataaacagttgaataatttgtcctcagactctttactatgcttttttaaaaattaatttaagaaaaatgtaaacatagtaaaaatcttcctatgcaattaaactggtccaggtctggtaggtatagtatcaaagttgagttaaatgtgtaaaaaggaaactatttgagatacattgacataggcatcagcaatctctgaaagtaaaaattggaggtttaacagatcattttgatttttcacattgatttttttatttgaatgtttacataattttgtgattcaaaatgctcatattttagttggtagcatttcgactggatgtgagggtctgatggttttctctgatatgctttgacgtgcttggatgaaggaaggaatacgaatactcattcttccttccctaactcctcgtacggggccatatcagaattctagaattcttgccactgtgattcaattgctaacctaaagtcttctctttttacaaattcacctgcttcagtatatattaaggtggctttcgagaggcaagatgcttatttaaaagttaagcgtgaatctgtaaaattaaggttggttgcgtaaagttgaagttaaccacatgtaagaaaggaaaacttccattagttttcttcttagggtgtgagaattttacctaggcacatggatattgggctgaaaaaaaaaaaccgacatttttatttaaaactacatgtaaaaaatcatgaaagattcagtaattatgttaggctcacaagtgaccattgagtttgcccctgtactgcttcccagcttttgtggtgttgaacttttctgttcttccaatagggagatacataatcaaaatacacacgaagacgagatagcaggcactcagttctaggccagtttctcagtttcctttgggcctgcctttattttgatagtcgcagaatgcaggttcagatgcgatccggtgcattctgggtggtatccccatagacagaatacaagttcaagactcatttttatgtccatttttatagtggtagactgtatgtaatagaccagatggttcattccaaatacatgacttggtcttactgctatatatgaaggaagtttgaaaatgtaatggggacaaaagccgtgcgtgacttcggtatacccagacttcattcagatttcttaaaaatctgctagggatgtctgttgaccagacgttggaaaacctttggtgtcagggagagtagaggagaagttctgattttcataaccctggtttcttatctaggcctgtttccttgcgtgaaaacatacatcaccaagtaatttgtagtacaaagaacaagagaagaaaccctaagaagatagcttatttgttatcctcccttttaatgactaaccttaatccaaatgaatccactgagaaccagcctgtggatgcctactgggctttcaccctggaccaggaatttttgacgtatgcctgtgttgaaggcactggatgcttgttttgtggaagacatgttcattgaggtaagtggctcatcgcttggtgtgtttggctctctttggcattatgcatagccaaggtcccagattttggctgctctcagtgggtgttcttgcatcagaactttaaaaaaaataacactaccttaacactgagactgtcaggtatttgtcagtatttatttctaatttcctactttaaatcttaggagacaaagtgtttctccaactggacgctgatttgaaacacaactagaatgctacaggtctctcttccagtatgcagctgctgtacctgaaaatttttccccataatttcccatctttagggtatgtccctgttatcaggtgtggaattaatgtgggtaaatttccatttcagttgaatttcctgtcatccccagcaaaacctgtgaatccttcttcaaagcatagaggaggcagagacaagtcttaaaccggcttcccttcgcttttaccaggtagcctggttcagtcccagctgggtcctgaaggagcacagtactagagcctgagtcatgttgactattaataaagtgcattaagtttgggtcaggcaaagtggtggcaaaagttcatgatgcaggacagaggaaacaagtggacaagacaagtggagcccagctctgttcgcatgggaggccgggcgatgctggcatgggtgtggttggccgagttctcatagctagagaaaggccgtgtaggtataagtgcttaatgtttcatctgtctgaaagaccagctatttgataatcttcccgattaaatttctaaaattgctactttgggaatttttttctttattcttgtaaagttttgcttccattatatactcattcattagtcagtgtacttgcccctgaattccatatctgaaactgcagtcacgggagattcagagccaagggcaaaataaagtggcaggcactgggtgtgtgtggtagttctgcactagggtggccaggaagcagccaagcaggtgtgccgggcagggagttgttaatgaacacccaggcaagaggacgggcctgagcctgagtgtggccagcagaaagtgttgagttgcttaaaagagaccctgggaggatgaatttggaatcatcatccactcactgttggacagaaagactgcagagaagggcactgctggggtggggtttgttaactccctctgaaatgaaagaaaatacctctagtggcatgaaacggctaagttttttttaatgttacttctttaattttagagacggtgtctggctttgtcacgcaagctggagtttggtggtgtgattgcagctcactgcagccttaaacaactgggctaggtgatcctcccatctcagcctcccaagtagctgggactacctgtgcacaccaccatgcctggctgtttttaatacggggttttgctgagttgctcaggcgctcctcaaactgctggcctcaagtgatcctccagcctgggcctctcaaacataaataggctgggcgtggtggctcacgtctgtaaagatttaaagcggaaaagcggaatgcagtgaaatagcatgagaaagagcgtttttatgtacatcacagacaagccttgttctgctgaagaggtgatgccacgaggtggggaggagctcacttcaggcaccactcccacttccattgcccgcaaatccaggaaagaaatgactaatgaactctagtgatcgcaaactgctcaatcggtactcatcaatttaaaatgactgtccagccttgctgcacactaaactcatctgtagaactttataaaaccacggatgaccatcacactagcaggattttagattcagagttggggtggggcctggagctctgttttctgaaactttgcgggccattctgaacctgcagccaggcaggactctggcaagaagaggcgtgtggctaatatgacggaagtctgaatccaaggactttttttttttttttttttggagacagtcttgctttgtctcccaggttggtgtgcaggggtgtgatctcggctcactgcaacctccatttcccagattcaagcgattctcgtgcctcagcctttcaagtagctgggattacaggtgcacaccaccacacccagctaatagtatttttgatagagagggggtttcgcaatgttggccaggctggtcttgaactcccgacttcaagctatccacctgcctcggcctcccaaagtgctgggattacaggcgtgagctacttcacccagccccaagaacatcttgaaatggagtttgattaccaaagtttacatagagtaatggataattaaaattttcaatttatggtgcattacaaaatgttataaacaagcctccgggaaaggcagaaattgccagatgtaagtatataaaacttacacagtttgttcctttttgttgtcttcccttgtggagatgggtcagtgtaacatcctattcattaatagctctcagatgtcccatgagaatggcacatgttatttcccaacagtgggaatggaattagttcctttatatctcagtctcatctggtcttgtaagccggtgaagggtttcccagggcaccagccaccagctctgtatagtagttacagtttccctctctagaatcccaaagaggttcagatcccactgctcctctcattggcttcgtgaccctgggtacgctgctcaacttgcgcaaggattactgtccgctttgtacaatggagatacctatagtgtccacttaggagatgctgtgcatgcctcagtgaggtaatgtccgcagaaagcacaatgcctagtatgtagaaagtgtccgataaatataatatgcggctaaacagcggagtccacagcctgaatggaacttctttttctacgtaaatacagcaaacaatgcagggaaatgaggtggacagtgttctccgtggagggctaaacagcattgctttccagctgacttttatttttggagtctgggactaggtgttaacattcctttactagttggttttgcataccgcacagtccctgcatctatttaagagttttgaggtttgttgtgggaagtttttttttttttttttttttttgaggcggagtctcgctctgtcgcccaggctggagtgcagtggcgcgatctcggctcactgcaagctccgcctcctgggttcacgccattcgcctgcctcagcctccagagtagctgggactactggcgcccgccaccacgcccggctaattttttttgtgtatttttagtagagatggggtttcaccatgttaggcaggatggtctcagtctcctgaccttgtgatccatctgccttggcctcccaaagtgctgggattacaggtgtgagggagtttttcggtagtttgctttgccttgataaactatatgatatttaaatgttttataaggatgggttttcagtagaatttctctgtacaacctcagggagactgcctggaggaataactgtggtaagggtctgtttttgaacaggcatggtcattagacccttgtgatcacgcatccaggggccagtccccaccctttgctcccactccaaggaaagtctgttacatttttagccttcagaggtttgatgtagataggaagagatgagggtgacagaaatcagctcttaagtttataaataaaacagggatattatcggggaagcttttgaaatgtaataggttgtaacccacattttgaaagcagtaaggaaataattgctgcttttttcttcttctttattctgttgactttgttgataatattaggtgactacatcgagcctgggttctctcagtattagcctgttattcctaaagtatcatcctctccttgtatcaaatataaggacaaaaatgtcttaggataaaagtctgtttgtttgcattagactatacatgatttgcattacaatgggccgtggatttggatggatgatgaagctgaaacaagggacctaatcatgggatttaactgttcacttcaggtagataagatatttctgggagaagtaaattggatgagcttttgtgcttcccagcagctccaggtcttgtccctggccagtctgggcagctctgcgctcagaggcctttggcacgatgggtcctcccagcaggggctccagcgctcaccgctgggtgagatctacagggctcagtgcgcttggagtcctggattcctccaggactgctactgtattccaattgagtggtggtttgctcttcacagagcgcttacatgggattcttaccttctgactggagtgtcaccctcgcccaggaatgtgggtgctggagagacgggctacctctttctgtaggcggatgtttctgaaggcatctcccactgattatgtaatgacagctacttaacatcttctgtagtcttgaagaattcagatgaggagcttgtccagggagggctcccacgtgcgtattcactaattgtggtctttctccccagctcggttttgtttgcgtattagagttctgaccatcttcactagaagtgggggcggctagcagtgactagatgcaagaagcaaaacggtaaatttccttttactggcaaaattaaaacagtgaacttgaaatatctcccctactccctgcagagacactctgaatcaaagaaaacaatcagtactaaccctggaaacaatttaaaaatgaacaaaaagtcctaccctgaagaagaagaatgtcttaccagcaaacggtcttgggacagctggtgtgagaactatataagagaaatcaacaaatattaattgaacaccagtcatgtgcaaagcacttagctaggtcttagggatgaggacaaaaagcatgtcacattttgttgttataagtgggaaagataagtaattacaagtaagcccagtgtttttaaaagagtgtgaacagagaccttattctaatccagagaggctgtgaagtgctgtattcccaaggaactgaagttctagctgatacctaatggaggaatgggtgttatcctggtgggaatgccctagaatctaggagaagacaacaggccattcgaaggtgaggaggcttgccagcatcagtttataagtggacagagtcgagagctatttaggaaggagagctgacagacctcggggactgaatggatgctgggagtaggggtgaaaagagaggagtcaggcttcctcccagagtttgaggactttgagtgctaagggcttgtaggagaacgttgtggagatgtccggtaggcatctgaaagaatggatggaggaggggaaagtcgggcctgggaatggccaatttctggtcattctcatataggcaactgatggcgaaggggatgacctagagggagttgggaggacagcctaggatacgtaaataagagaatcttgtatgttctaaaaattaacatcattgcagcttcctcagccctaggatggtttttagatctatcaagggatagaagattgtccagccccttgctgcccagtgtagtcagtgggctgacgacattagcatcacctgggtgcttgctagcaatgcaaaatctcaggccccagcccagaccactggatgagaatctgcatttgaacaaggtccccaggtcattcatgcacattcaaagtcagagacactgccccaacacctcactttagagtgagaaaacttaacaggtttaagcaacttgcagaagatgacacaactgaccagcgacagtctgtcttctagtcaggcctctttccagttctccacgctgaccttgactttcgagatcacataccaagaccttcagctggatggtccctgtagctgctgtgaccactagaagcagggttaggggcgagactaatttaatatcaattaatgtagacactaggcttagggctagggaaaatgtagtgaaggatgcctgtattgtcctaatgaaccacactggtgcctacaaaatttttattttggcaaaaccgtccatgaatttggagatgttgaacaggtttctctccgacaatcgtctcgtttaattgtgaaactagaatcacttccaggaagctctgaagaatcaagtctgagtgatgcaatgctgcttcctccttccttctcaaaagcctgctctttgcccatttctctgttcccaaggtcattttctccccttcttgtttccaggatccacagttcctgctctgcttccgctttccccactgctggttcaggctgtctgcagcagcagcagctccagggtgctgggacactgctgggtgacgctccacagtgtgtgcttccccatgtggcttccacagtcccctcttgcttctcccacatgttagtcttcatagattagtcttcatcaattcttagtattattttttagggatagggtcttgctgtgttgcccaggctgcagtgcagtggtatgatctctgcttactgcagcctccacctctgggactcaggcgatcctcctgcctcagcctcccaagtagctgggaccacaggcgcatgccactgtgcctggctaaattattttatattttgtagagttgaggtcgcacttttttgcccatgctggtcttgaacccctgggctcaagcgatccttctgcctcagcctcccattacgggcaggagccactgcacacagctgatgaattttcgtttaggcccctttctttgtgagagggggccccaggattatgccccgggattaaaagaagctgggaggctctccaggaccctgaacaaaggtggaagtagggttgtaaatggaagaaaaaataagagagattcattatgttctaatgactatgagggaagctttagtttttgtctccctgaagcatcaacctgctttcctgctgctgttatcacatccttccagggctatcggctgttcaggaacaggagagctctggaagagcagggacgactttggcttctgtttcctgcccattgcagattaggcatcagcaaggtaccctcctgtttttgtatggctcaccaaactaagggtgattttcacattttacatggctgaaaaacatcaaatgatatttcaggacatagggaaattatatgacatttgaatttcagtgtccataaatgaagttttattggaacataaccacattcatttgcaagttgtccacggccactttggtgctactgtggcagaattgagtagttgctgcagagaccgtatgatgagaatatgtggcattctcatcattttgccctgccgctctgtgcaatgtaaattgcagtgacacagttataactcagcagcattttgaatgccacttgtattcccatgctacaacattttattttttattaccaatatatacaagaaaagtggatttcaaatatcattgtgcttttaaggtacaatggagtatgaattgttactgaattaggcagcaaagtgcaatgacatggtagctgtcctaaggaacacaatacaaccaggtgcagtggctcatgcctgtaatcccaacgatttgggtggctgaggtgggagaatcacttgaacccaggatttggagaccagcttgggtggtatagtgagaccccccatctccacaaaaagtaaaaaaaaaccaaaatacatgttgttacttcccatcttagcactcatcaagatatttctaattcacaagaaagcaatggtcagaaaaattagaaaatttaaaattgaatatctcatcacagaatttattcacaaaaataaaaaatgaaaatgaagctacaaccaaagtaagtttcagatggctcatttgttagccaagcaaggaaagtcacttatggtgaattaattaaatcatgcttgattactgcagctgaagaaacatgctcagagaaagtaaacttgtttattggcctttccacgacaacagttgctcaaagagttgacattaggaatgacatcagtagtcgactaaaaaggcaaatggttttgagtggtttcccctgactctcatgacaggggtcaccatatgttatgcacactgctccgctattgctctttatttgaggagccagtaccaagttggaagtaactgaagaattggcctctatcaatagtcttatgtggaacaactactggcaaaagtattttcaaagctgagaaaactggtcaggtgtggcggctcatgcctatagtcccaacactttgggaggccaaggtgggcagatcacctgaggtcaggagtttgagacctgcctggccaacatggtgaaactacatctctactaaaagtacaaaaattagccgggcatgatggcatgcactggtaattccagctactcaggaggctgaggcaggagaatcgcttgaacccaggaggtggaggttgcagtgagctgagattgcaccactgtactccagcctggatgacagagtgagaacattgtctcaaaacaaaaagttgagaaaacgaattcagtacaccctgaagtggaatctgctaagatgtgttatgactgttggtagtggaaatatatgtgtgtattagtccattttcatactgctataaagaaaagcctgagactgggtaatttataaagaaaaagaggtttaatggactcacagtcccgcatggttggggaggcctcacaatcgttgtggaaggtaaaggagaagccaaggcaagtcttaggtggcggcaagcaagagagtgtgtgcaggggaactgccctttataaaaccatcagatctcatgagacttactcactattatgagaacagcatggtaaaatcctgcctccatgattcagttacctcccactgggtcctacccatgacacgtggggattatgggggctacaattcaatgagatttgggtggggacacagctaactcatatcagtgtggaatagaaaatggctcagttggacaacttacaaagcttgtaataatataaggtgttaaagcctatagattattcattgtattatttaagtcaacagatactttgtgagaaatatttgaatctatcatgcattattgaaccagtattgtcaatagtgaacttcctttagctcttgtggacttcactatcaacagctctcatgaatttttgtcagaaatattagctgaatatcccgacatggcctgtaatacagcagttcaatggtttagtagtggtaaagtttcatttaagttttgagctcaggacaaagattgaaatttttctgaatgagaactgccccgaaccaccgttactaaacactgaatagttttggaaattcacttttgctgcagacttgatagtgtttcttaaggaattcagcctaaaccacaagataaaaacagtgtttatgtgaaactcctactgtgttaagtgatttcaagaagaactattgtttgaatcacaactaatgttactgctttaagctcttcccatgttgttaaaagttaaaaaaagaagagctccattcccacacacatttgccacagatacattatctgagcccaaactacagtttgagcagtgtgttagggacctcaatgcaaacccaaaagaaatttttatatttcagaatccattgatctgcatttgagaagtgattaatgtgttgaaaggcaactatctaaagaaaaatttaatagagtctaatagaatcttataaaaatgtataaatgtgttttatgtaataaatatgctaagctaaacatcttatgctcatgagctgggtgcagtggctcacacttgtaatcccagcactttgggggtctgaaatgggaggatcacttcagcctaggagttcaagaccagcctgggcaacatggtgaaaccctgtctctacaaaaaaaaaaaaagtacaaaaattagcctcgcttggtggcacatgcctgtggtcccagctacttgggagatggaggtgggagcatcatccgagcctgggaggcagaggttgcagtgagctgaggtcacaccactgctctccagcctgggtgacagagcaagaccctgtctcaaaaaaaaaaaaaaaatgctcatggacatagtagtgttgggaaggtacctatctgtgtgaagacatgttcaaagatgaactgtgtcacatctcattccaaatcagcattaacagataaatatatgcaaatatgcaattggttttgacgattcacaacactagctctgaatctcaattagggaaatgttattcccccaaaagatttccaattcttattggtagaccggcgttaccagaaaattgtactctattgttatccttgaatttcatcaattaagatttttttggaaaatatttttggaaatatttattctcttcttatagaaaacacctattcaatattttagatttgcgccttttgacccagaaaacctaaagtatttgttatttttacaaaaaacatctctaagagatggagcaaataagtaaatgggtttgggtttacaggttggtatccccaaaaagcaagtttggggcaggaatctgggaccttctgctcccactccccagcacagcctctgcttcttaaagtcctggggcctgtaggaggaaggcaccttggtgagaaccaccaagaggatggctacgtgcccagcagcgggagatggcagtccagagatgagtttgcaggcctgcagctcgtctgctgagctcgtcaaccctcatgctgatctccactcaccagtttgcctgcttagcggcagtcctgttgtgtggatcttctcacttaatgcacacagcagtcctgtgaagcagatggaccctgttcctgtcctcatttctgagatggagaaaattgaggccccaagagaacggtcacttgtagcatccattggctgcagtgttgaggccagcttttgaccccaggcaggcagaatccagagactgctttgaactcctctgccaagcccactggtgaggaatgctcaattactgccccacattgagaggcatttctttattcctagtaccaaaaaaaaacatgcttagcaaataggctttggagtcaggcagagcctccccgccactttttttgtgtttttgttttgttttgtttttttaataggagacaggatctcaccctgtcgccctgactggagtacagtggagtgttcatagctcactatatccctgaactcctgggcgcaagcagtcctcctgcctcagcatcctgagtagcttggactacaggtgcatgccaccaccaagcctggctaattttttttttaattgtttttgtagagacggagtcttgctatgttggccaggctgatttggaactcctgggctgaaacactcctcccaacttggcctctcaaagtgctgtgattacaggtgtgagccatcatgcctggcccagaccccattttaaatcacagatctgtcgtatactagttgtgtgtcattaggcaaattgcttagcctctctgatcctttattttcctcagctatcaaatggggataataatatttgccttgcagcattgttagggttggatacaagtttggaaggcccagatgtgatgattggcacacaaaggctaatactgggattccaaggagtcccatgtggtgggtccatccgggcccaacaggttgtatatcttagcactcattcggccccatcctgcctttccctgtaacagtggccggtaggggtcccccgaacagtcaaattgaccagtggtcttgcccgtaaagggtgtttctgggatcagagggaagaggaggattaatgattccagaacaacaaaaagtcctcaatttccacgtttctggtcttactcttggaatccagggtcgccattaccattatggaatatggaggaaccccctttttgggcttgtagaaacccacagacacatttctcaggggctgggccatgtgtgcattcttccccagtctccttcccactcccactggccgtgtcctggcctggccttatctttggctggactcattgttataatgcgtgctgctggtgaagtgctcactatgtgtgagtctctgtgctgaacagtccacttcttcctcgctctgggactttgggcaaggtacttaaactatctgggtctctgtttcctcatctgtaaaatggggatgagaatgtcaccttccctataggttactatgggatcaaatgagttaatacacttgacactatcagaacagtgcctgccgcatagtagggcttcatgttcgtggttctaatagcctgggacataaggactgttacctgagattccataatacacccaaggccacagagctgctgatttgagagtgagggttcaaacccaggtttgcagactaaagccaggctacttgaccattaccccaaaccgcatccaagccatgcccaccccctcccctgctgtctccccatgcccctgtgccccggctccatccgttacctgatgagcaatgcagacatttccctcttctattgaaagtcctatccctgtcattgccatataacctaagagtctggacaagtcattccctaactaccctcagcctcctgcactccagctttatgggcctctcaaatgtgcctcctctggcacttgcttctggcttgagcttctgtgatgctttcctggtcctcaccagcatcacatccattcatggcccgtggtcccatctgtgttgccctgcacttagtttgtgtccttagtctccacaccccatagctggtgtcagagtcaacaatgtctctccccttttcctcctgaaggcaggagctgtttctcctccttctcctacctctagtgcatggtgcgcattggatggatggatggatggagggagggagggagggagggagggaggcatggaggcacttgcttcttaggaaggaagacagttggctggaccagttagatctctttccaaaagctttttgaagttactttttaaaactgtgctaatagagctggaagggactccctcaagcaggaagttgctgagggagccagggactaagaaacaccatttcactcttgtacctgaaagagctttctcggcttggagtgggaaaccacaggctgccatccccaactctgctggttttagagaaacacagtcgggaggcgcagctcccccattcaccgacaccctttggggcagatacttttagttttgtttgggcagagaggaagctcggggctggggactgtcatgggtggccgtgtgtgcagctccagcaccccagattggtcagggttgagggagctgactgaggtggagctgtgcccatggccaagggcaagggcccagggttggttcaggtgggtgggcttgggctggcctgaagggggcaagagtggacatttggccaccaggagagagggtgaaggcaaatagaaaaatatgagttgcatcagggaattttggcttttgaacctaaagccaattttttaaaaaatgatcaagtttctttgcttctttgaatatttaacaaatagttatatgtgatgtaagcctgaattgtgaagaatctatgattataaagagttagggcttgagtagcatgccccatctagtcccagatgtcatccaaaaggtcacaggatgggccggatgcagtggctcatgcctggagtcccagagattctggaggccaagatggaaggattgctggaggccaggagttcaagaccagcctgggcaacagagtaagaccttgtctctgttaaaaacaaaaacaaacaacaaaaaacacacataaaattattagctggacctgttggcacatgcctgtagtcccagctactcaggaggctgaggtgggaggatcgcttgagcccaggagttcgaggctgcagtgagctgtgatggcactactgcactccagcctgggtaacagagcaagactctgtctctaaataaatcaataaatgaaaccaggatggctaaatagtagcaagcagaggcttaccggcagtatcagtttgtggcatgtaccgaaggcgatatccagggagaggggaaggacaggttgggttttatgcctcatggggcccgtatcacacaatggagtcacagattcagcaggtctgggggaaaagctatacatatttccaagggagattgagcgcatgggcaataggcaaacgtgtaacatgcatcccatgtccacttgggggtgaggttctagcattaaaatgaggtggatttggcttttgacttcaaaaggtgagctatagggcacaaagttggtgcacaccctgtcggcgctcaagctggccccgggtctgcagtgttatgaggagagccggtagggccgccctcggtcccagcagagttgtaatggtctgtgttgtaaatcagagttaggaggggtctgacaactttcctgttagtgcggagtttagccccagtgtggtttgtcctgcagctcaggaatctagggggttgcctgcccactgagcttagaccctggagcccagggagctcttaattgacagaagggtgtccttttggtctcagatcataccggtaacgctcctgccaagcagccctggacaggggcccagcctaccgccaggagccacctgtcaaacggcggcttagggggtttaaaaaggaaattaatccctcttcaagaccacatagataaacctctggttgggaggtgacagcaaatcttatcaaagcaaattgtctagacgtttcgaggagctctaggacgtggacctgctcaatctttctagaaaggcctgcggctgcaggggccaggttaaggggccccttaacctgcttcagaagaggcaagactgcgtccttccccgctgcccactgggactgacttggaggcccgaggaaggatttgttcccgcaggaccaagttccctcaggccacaccagcctgggaaccaaaacaggattgcagtgacagaacacagcgtctctggctctgcgcctaccctgttcttgctgtgcccccagcgctcttgaagctgtgtccttccctgcctgcctccctccagctgggcccccctctccagccaccctgtcctgccctccttccctccctgcctgggtcttgtggctgcggaggccagaaagtggagtggcccctatgttaccacaagtcccgcagggcagaggaggggaggaagggggcgcgcaggaagcctgggaacacccacccttcagggctcaggacaaccccactcctggacagcctccagccctggcagcgacaatcctgggccccgcccagtactgcatgggcactgccaagacagagctggacacatgcccacggggtagagtttgatttgggggccatttttgcccctttctacaatgacgttttctctgacaaaatttagactgtaatttaaaaaatagtttctgactgtgatgagaaggaaaaggcaacatgcttcccaaactaagagtatttgaagactttttgagttcctgtaataatataccaacttcgcttagatttaacaattgttttttgctgaaacgtggtatttccaaattacttcagtctgcatctctaaaaaatgacattgtcttgcttatccattaataccattatcacaccttaaagagaattaaaatcattccttactggtgtcaaacacttgatccgtattcagtgttcccattgtccccaaaatattttactgccagtttgttcaaaccaggattcaattagggtccacgtgttgtgtttagttcgtttcttacctctccttagatctagaacagtttgctctctgtattttgggtaaaagaaaaatgttccccagcactttaggaggccaaggtggctggatcacctgaggtcaggagttcgagaccagcctggccaacatggtgaaaccctgtctctactaaaaatacaaaaattagccaggcttggtggcgggcacctgtaatcccagctacttgggaggctgaggtgggagaatcgcttgaacccgggaggtggaggttgtagtaagccgagattgcaccactgcactccagccttggcaacaagagtgaaactccatctcaaaaaagaaaagaaaagtcttccccagtctaatgtttttaatggtttcatatttttcacgtaaatctttgatccatttggaatttatcctattattatatattgtgaggcatggattcaattttatattttcccaaatggctggctggttgttccaacaccacttattaaaaagttcatctttcccccatcttagttaaagattcacattgatcacttatcatatgataactgtcgtgattacttgggtcttcttctgaaccttctaatgtgctgtgttggtttgtaaacctctgcacatgccactcctacctggcttcagttacagaggcttctgggccgtttcaatacttagcaggcaggtgcacctcatttcatcacgtttctcttcggggttttcctgcttacccttgcttttattcacacacacacatatatatacacacacacacgtatacaagtatatataattaactggagttgggggaattagctgataagagaactggctaaacaatgtaggaatcaccaatgcacccagcagtcactacacctggaactgatcctgagcacccaacgaagggccactcctacccgcacccctctgctaagacccagacctcgtggagagggctgccgtcatgactcattcatgggagagggtgtgatcgtgactcactggacgacagaggagcttgctgaggtgcttccccagcaagacgtgactgaaacccaccctctgctgtgggaattggcccccggggaggtgccacgtctcagagctccctgctggctgcctcgggcagtgctgcagaagtccctgggggggaacctgtctggctgcaggctctccagcactgctcgtgggagggtgattggcaggtgtcccatggtcagtgctgtgctgtgcagtcactagggtatgtgcccaggtaaatccatccgtgggtgtttctcctgctggcactggctggaagccacccagggctggggctgtgccatggaggccgctcatggggggactcactgctggaatgcccaggaagcaatccagggagaagcgaccagcccgcaggactgagaggcactgataccaagtgaactgaattaataatatgggtgaagtgttcgtttcattttttttgagagggaaaataaagattcttggtttcattctaactacctactcacttgccaaattgttagggggactagtggcactcttagtgtagactctcaaaaacagctcaaggatattaaaggacctattttaaatgtaaaatttgacccgttttttaaaacttatatttgtaggttcaggggtacgtgtgcaggtttgttatataggtaaactcatgtcatgggcgtttgatgtacagattattttggcacccaggtattaagcccaatgcccaatagttatgttttctgctcctctccctcctccactctcgggtaggtcccagtgtctgttgttcccctttgtgttcatgaaaacttgatcagttttgatgtatgtatacccttatgtcatcacaccactatcagaatgtcaatttcatctccccaaaaactccctgttcccatttctggtccatctttctctctgtcccattcctaggcaaccactgatctactcgtagcattttcgattggttaaaataatataggaaaatcaatgcctgagaatagcgagaaaagcacaaggaagaagagcaattaggggtggggcgacttgcttcaccagatgttggaatattctttgaagccactgcagtctgatcagtacggtgtaggtgcaggaagagacaactggattggaggaaggacagaccggttgagacacagcccactgcctaggaaggggactgtgaaacaaggagcagttctatcagaggcagtctgacaggggccaccatgcatggatacttcttttaatgtggtaggggcatgattcaaggattggcaggatccgaagaggaacagggtgggcagcttcagaggaggtagcacttgagaagggtttggcatgatgcctgcatttgtttgaggaccagtgcatggggattaggagttcagggaagctgttcaaagaactgcatcagcaaaggtaggaaggtgtgagtggcatgctttgatggaggcagaatagtggccaaagctgtccatgtcctactctcaagagcctgtgactgttaggttacatagcgaaggggaattatggttgctgattagctcgccttgagatggaggggatgagcctaggttatctggatggagccagtgtcatcacaaggggctgtatgagcagaggaggaaggcaggagagggagacccagagaggctgtagcacgagaaggactcggtcccatgctgctggctttgaaggtggaggaggggcctctagaagctggaaaaggtaagcacagggattctccccttcagcctccagaaagaaatgccgtcctgccgacagcttgattggagctgagtgagtcccattttggacttctgacctccagataataagtttgtgttaatatctgctatgtaccaataaaaacaaaaaataacagacttaacaatgacagcaaaaaatattttgtgttaagtcactgactttgtggtaatttgttacagcagccacaagaaacaaatactagcacaaagtagatcatattggtggaagagtaaatccagtagaaggtggggagagatgagggcagagaggggatcagggcccagatcatgaggtccttgagtgtcaccctgggcgcttcattccattggcaatgtcaaggatttctgtttaaggaccatgactttggctggagggtttggaggcagaatagagtgcactctttgttagacattggtgtcatttccatcttggtgacgtcgctccttagaatactgttataggagaggcattaatgagtgttgctgccatgggatgtgaaaggctacacagtctttactcgacttgcccttcttatgcttttaatttcaggttttctacaaagtttcactttacctcccctttttatagtctggcttgacttggtgccctgaagtagaagagctacaagtggcatctgggagccgtaagaaagagccacggaggagaggaggacttgggcagaaggtggcagtgggggcaggagaggtttgcgcagagggcagatggcttcctgcatccgggaccccttggcacagcatctgtgacagtcgtggcccatcttgatccagactcgagctagaaagcctatgcctggctcctctcaatactctggagactattcacgtggctctcacctccactgtcacctcagggttgaagtaacccagggagtcttttccttatcatgaaaagagcccaaaccattcttattattcataattattatcataatgattacctggaagtctctcatctgaagttcatctgacccaatttaattaatgtcagggctcaggcaggtcaacccatgattattttcgtgtttactcaagtagaatttttgtttatttgtttctgaggcaggatcttgctctgtcacccagactggagttcagtggcacgatctcggctcactgcagcctccacctcccaggctcaagtgatcctcccacctcaacctcctgagtagctgggactgcaggagtgtgccaccacacctagctaattttttcctatgttttgtagagatggggtctcgctatgttgcctaggcttgctcagggagatttttgttgtagacagtaagcaacacaagtatttgttattcagtgacacattaataagcttggttaaaagccctgtctatctccttcagttctgctctaatcttagttatttcttgtcttctgctagcttttgaatttgtttgctcttgcttctctagttcttttaattgtgatgttagggtgttgattttagatctttcctgctttctcctgtgggcatttagtgctataaatttccctctaaacactgctttagctgtgtcctagagattctgatacgttgtgtctttgttctcattggcttcaaataacttatctatctctgccttaatttaattattgttagaaataagtctcagagtcctaaggaaaaatgagcatttagacaaaggatttctcagcaaagcaaatttacttctatgcagaagggtgtctcccatatggctggttgccacgagagcacttagaacacaggagagtagaagtttttattcctaatgcgactcctgcccctgtgtccttcccccattggctggggtcagaccgcacaatttaaattagacccgactggctaaacgtttaaactttcttagataaggtggatgcataatgggagagaggggagaggaggaaggggtcatctgcggggaactagagagccagtcttttcctaaataaggaaaggaatgtgagctgttgttgataacgccactggtgctgtggcatgcctgagcatgtagtaaagttagaaaaaaaaggggaagaaaggtggggggtagtacttggaattaaagaataaaaagttgagcaggctgtttgaagagaaaccttgccatatttcacagttatttacccagtagtcattcaggagtaggttgttcagtttccacgtagttgtgtggttttgacttagtttcttaatcttgagttcgaaacctacatgttctgcacatgtgtcccagagcttaaagtacaaaacaaaaaataaaagggaaaaaaaaaagccctgtctattctaggggttactgttttgcacaagtgctgttctcaaaatcacagcaggccttggaccatggcgtggtactagcaagaggctgctgcttttaagttcagcagattctcactcagctccatgcagagcagggccccagcctcctgctcactccagggaaccctgggcagccgccctgtgctgacatgggtgggcagtggggctgcggtgggttctgaggcaggtggcaagggacatggagaaaacacacccaggtcttcaggtcctgctgtacaaaatgtcgttggtgttgtctttattttattttaattttttttttagagatggagtcttgctctgttgctcaggctggagtgcagtgatgcaatcatggctcactgcagcctcagcctcctgggctcaagcatctcccacctcagcctcccaactagctgtgaccacaggcatgcaccaccacacccagttattattattattattattattattattattattattattattatttggtagagatggggtctcagtatgttgcccaggctggtctcaaactcctgggctcaagtcatctccctgcctcagcctcctaaagtactgggattactggtgtgagctactgcgcctggcctggtgttgtctttaatgttttttgaatgtagaaatgttgataaagttcttgctctcaggctttgtaacccagactttcctacaaagcctggtgctcacccctgccttccatcttgcattcaaggttgtgggggaacccagaacattctagaaccgatcaactctttgcctttggttcagcacaaattaggctcacttttgagggaatgttcttaaaatgctgctccctggtttggtcactggcaacaaaactgaaatctgttttatttttatttttatttttgagatggagtctcactctttcgtccaggctggagtgcagtggcacgatcttggctcactgcaacctccgcctcccaggtttaagcaatttccctgcctcagctgccccagtagctgggattacagatgtgtgccaccacactcggctaatgtcgtttttttttttttagtagagatggggtttcaccatgttggccagggtggtctcgaactcctgacctcaagtgatccacccgccttggcctcccaaagtgctgggattacaggcgtgagccactgtgcccagccctgaaagctgttagaaggagatgcctgtggggagttgagctcatcagaactgaattttttatttgttccttactcaaaagtagcagctgtttatgctttgagggtaataattctgcttagtacagtaaacaattatttaatgcctagtgtcatgttaccctgagtctaaaataattatcaatggtaagacggaccatgaatttattataacagctttataggaagaattaaaagaaacaccatggcataaatggacccattgattgtaagactggttccaatattagaatcattgtattgtgaaaaaaaagtgtgcttttgagaatcgagggaagaagatatgtgtggtgagagaaaagggcaagagtagccataaaaatacgaattctcagtattaaaacccatttatgcctagtgttccattattggaatgctaagcatgtgggagttatttatatcctactgctgaaggtcatcaccaaggtctgattgcctcaggcatacatgggttaagaacccttgctttgtctgatggcatttcatatgtagactccctcatgctcttcccatcctttcccatgagtccccaaagtctattgtgtcattcttaatgcctttgcatcctcatagcttagatcccacttttgagtgagaacatacaatgtttcgttttccatttctgagttacttcacttagactaatagtctccaatctcatccaggttgctgcgaatgtcattaatccattcctttttatggctgagtagtattccatcgtatatatatgccacagtttctttatccactcattgattgatgggcatttgggttggttccacctatctagttatttttgtagaataaattcctataggtagaattactaaaaagtgcatgcatgtttacactataatgctatttcaaagagtcctactgacggggttgtacctttctctagacagtataccagaatgtccatttctatttcagcacgtacatttccctccctcttgtcatttttgcttggatgtacatacactggcttgtgataggagactcagtttacatgtttgtcatttttcctattaggttgttcctctttttcattgatttctttcattttcattatcttaaaattataaaatatgtaatacatataaaaaggtatgaacactctacttgtgaacttatttactcatcaaacacttaaagataacattattcatgcagccaaagccacttcttactgatttttcaggcgctttttacatattaatcaccctttggctgttttgtatattgcagatatgtttcctagtttgccctttgtcttttcatttgtctatgatgtctttgacatatgaacattatacgtttttatgcaattataaagaatatggtttcctttattgttttttactttcctgccagactaagaagaacctatgtgctccaggataatataaaccctctccaatatttttctcgacttttaaaaccttgtttgcatttaaatgttctatctatttggaacagacagtatgtgtgtatgtgtgttgagataaaaatataactttatattaccaagaaaattgagcattgaggttagaataaacttaccaagttggcaatctgaaagtatatcaccttaatgaatgcatttctgatacgaattgaacattcctaatccaaaaacctgaaatatgaaatgctcccaaatccaaaactttttgaatgccaatatgatgccacaagaggaaaaactcacacctgatctcatgtaacaggtcaaagtgcagtcaaaactttttcatgcacataattatttaaaatatttataagattaccttcaggctatgtgtaataggtgtatatgaaacatagatgaattttctgtttaggcttgtgtgggtctcatccacaggatatctcattatgcatatgctaatattccaaaaatcagaaaaaatcggaaatctgagacacttctggttccaagcattttggatgagggatactcaacttgtattactggagaggttgaacctcttcattctgtttttcttgagttctctctttgaaatattttattatacaaaagtaatgtaatgaatttatctgtattcatgacttagcttcaacaattgtcaacttaataattcatctctatctctaccactccccaccctgtattctgttgaaccaaatctcaacatgttattttatctgtaagtatttcactatgtgtctctaaaacataagcaagggctttaaagaaatataatcataataccattatcataccttaagatataattgttttatattttatttttattttaagctctgaggtacatgtgcaggatgtgcagtttgttacataggtaaacgtgtgccatggtggttcgctgcacctatcaacccatcacctaggtattaagctcagcatgcattagctatttgtcctaatgctcttcctcctctcacccaaccccaacaggccccagtgtatgttgttcccctcccagtctccgtgtattctcactgttcacttcccacttataagtgagaacatgtggtgtttggttttctgttcctgcgatagtttgctgaggataatggcttccagctccatccatgtgccatgcaaatgacatgatcttgtccctttttatggctgcatagtattccatggtgtaaatgtaccacattttctttatctagtctatcactgatggacattttgggttgattccatgtctttgctattgtgaatagtgctgcaatgaacatatgcatgcatgtatctttataattgaatgatttatattcctttgggtatatatccaataataagcaataatgggattgctgggtcaaatataagcaataatgggattgctgggtcagatggtacttctggttctagatctttgaggaatcatcacaccatcttccacaatggttgaactaatatatatttccaccaacagtgtaaaagccttcctatttctcttcaaccttgccagcatctcttgtttcctgacttatcaataatcaccatcctgaccagcgtgagacggtatctcactgtgagtttgatagatataattgtttaatatgatcacatattagatcagtgtttaaatttctcattgtcttataaatgtccaaataagtttcatatgttggagttggttaatatagctctaaatctcgttaatttcatagacccctttctatctcttttctttttcctgcaatttgttttgaatacattatttttaatttattccttattctgtagaatctcctagagtctgggttttgctgattgcatctttgtggtggtgtttaacatgtttctttttcttctggttttttagaagattggtagttggatctaaaggattgttcatattcaaatgtgacgtttgggggtcagttctataggtaatattgatctcaccctctttttcccaatatttattataaaaaatttcaaacatacaaaaaaatggaaagacctgtatagtgaacactaatatacttaccatcttgatcatataattagcattttgctatatttcctttatcacattctattcatctctcatctctttatccatccctcaaccttcttattcttctttatttcaagtaagtttatcagtagagttcacctataaacacttcagtgtgcatatcattaattagagttcacatttatttatggtttttgttttttaggtaaaatatacagagagtgaaatgcacaaatattaagtgtacatttaacgtgtattgacctttgtaaccaacacctgtcaagatacagaaattgtcattaccctagaaagattcctcatcctcctactgagtccctacctgcaacactcggaggcaaccactattctgatatttttgccacagattaattttgcttcttatgaaacttcatatactggaaaacaagtagcatgataagagatttaaaaccaaccattttactaactacactaaatgtaactgaaattaaaactccatttaaaaggtagagactatcagactagatagaagagcaagattaaatgtatgctgtttacaagagacatgcttttggtataaagacagaataatgaattaaatgaaggaaaaagatataatatcatgcaaatactaactataggaaagccagattagctttcctatagttatatcagattaccagatataaaggaatattaacagaaacaatgaaggagcattttataatgataaagagcaatacgacaaggagatataacaatcttaaatgtatatgtacctaataatagcttcagaaaacatgaagcaaaacccaacagaactatagggagaaatttccacatccacagttatagttggagattttagaaatcttctttccataattgatacagttagtactcagaaaattagtaaagacaacaaaggtttgaataatcctatgaccagtttaacctgtttatcatttgcaaaacactacacctaaaggatatcaaatgctttgaaaaggattttaaaatttgtgaaatacagctataacagtgcatagagggaaacatagctttaaatacatatgtgaaataagaagaaaagtttaacatcaaaggtccataaagcttaaaatgcagagcaaattaaagccaaaataagtagaaggaagataataataatatgagcagaaattaataaaataaaaaaatgggctcaaactcttggcctcaagccaccctcccacctcagtctcccagagtactgggattacaggtgtgagccacagcatccagcctatacaatggccacagaaggaatagaaaatctgaattgccttgtatctgttgagaaattgaatttatgattaaaaaccttcccacaagaaaacacaaggctcacattgctcactggtcaattctgtcaaatacttaagaaataaatagtaaccctattatgcagatttgtttggaaaatgaacaagaaggaagtacttcccaattaattttatgaggccagcatatccctattttagatggtttaatgcattaaatttcataacattttgaaatacttaaaaatttaagaaaatatgtgcaaaaatgtaagacaatatctacctatacattgaaaactaaaacattttcatgagaaaaattatggaagacctaaactaatggaaagatatagcatgtttatgggttgaaagattcacaattgttaaggtatcttttctccccaaagtgatctatggattcaacacaatcccaatcaaaattccaggaggcttttctgttggatttgacaaggtgattctaaaatttttatagaaatgcaaatttttatagaaatgttatggaatatccaaaacaattttgaaaaagaacaaagttgtagaaattattctacctgatttcaagatttactaccaatatacagcaattgagactgtatgtaatggtagagagacagacaactaggtcattggcatggaagagtgactccagaaataaatctgcttttagatggtcaattgattttcaacaaaggtaccaaggtaattcaatgggggaaaggatattcttttcaacaaatggtgctgaaacaactggaaatccataggaaaaaataaacttcaaccattatctcatatcatgtacgaaagctaacttgaaatggatccttggcctaaatataagtgctaaaactataaaatttatagaaaagaacacagaaggctgggcacagtgtttacccaaacaaaatgaaaacaggcttacaaaaagatttatcttagccaggtgtagtggcgcacacctgggcctacagtcccagctacttgggaagttgaagcaggagaattgcttgagcccaggagttcgaggctgcagtgagctatgattgcaccactgcacagcctcagcagcagagcaagaccctctctctaaataaaagaagaaaacacagaagaaattacttctagaagaacctttacaacttagtaagaaaaagacaatccaattaaaaaggaggcaagatactcgaacatacatttcacagcaaaagcaatattaatgggccagtaaattcttaagaaagtgttcaacattattttgcatcagtgatacatacaataaattaaaaccgtagtattataccttttatggttttaatatgcattttagtagcatagatcctattatactccaggagaacggctaaaattaaaccctgacaacaacaggcgttaaggatgtagaatcacacaatgctcttgcatcatcatgggaaatatgaattgcatatcaaggtacaattgccatgggaaaatgcttggcagtttcttcccaagttcaacattcacctactctacaaccatcaactctacttctagatatttatgcaaacatataaagtaataaatatggctgggtacggtggctcacacctgtaatcccggcactttgggaggctgaggcgggtggatcacctgaggtcacgagttcaagaccagcctgtccaacatggtgaaaccccatctctactaaaaatacaaaaaattagctgggcattgcggcacttgcctgtaatctcagctactcgggacgctgaggtgggagaattgaacacgggaggcggaggttgcagtgagctgagattgcaccactgtactccagcctggttgacagagtgagatcgtgtctctaaataaataaataaagtaataaatatgtactaaagtagtcttttcaaattacttatatttattatagatttaacacaacaaatgcaaaattagctaaacttgtttttactatacatgtgatacactgtgtgtgtgtgtgaatgtggatgccacacagggttttgctctgtcactcaggctgaagtgcagtggcttgatcatggttcactgcattcttgacctcctgggcacaagtgatcctcccacctctgcctcccgagtaactgggactataggcgtgccccaccacacctggctaatttttgtaattttagtagagatagggtctcgttgtgttgcccaggctggtctcgaactcctgggctcaagtgatcctcctgcctcggcctcccaaagtggtgggattgcagacatgagccaccgtgcccagcccccatcatacactttcctttgaggtaggggaggagtacggggaaccttagtggccaggtgggtgctacctttttgttgtggatgctccttctccaggatggcgatgtaggtccacaaggtggatggggtcctgagtgaggaccgcctcagagagacagccagggcttgtggtcggtgactagaccgaccagtgttcagagagtgagacagcagcattcccgcatatggctgggctgggaaagctgggagactgtgtgctctgtcgtggatatgatgagcggttatgcgggctctgcttcttgccacctacttgcaggttgaaggatgtgcctattccacatcgctgatggggcatccgagctttccttggaggtgggcagctctttcggggttggtacccatcaggtgctgtggccagaactcagattcggagtctaaattcatactcacactctatacacctggattgagatcacagtattattattttcacaatcgaactgagcaaagatacggcagccactgaagactcactgtgaggtgcgtctaagggagaaaccatgggctgttgccgaagatctgggagaaaaagtgtggaaaaggcaaaaccgcgcctgggagctcctgcaggaggcgccccgggacactaggacgctgcctctccagcgggggtttgcagttttcatggtcctgtgtggcgtgtcctgcctggtttgcatttcagagagaaagaaggagaatgaaataggtttggttcacagccaatttcaggctcaccgtgtcttcagacattatgaggctgaggttccggggtccggctgcactttggattacaaaggaggggcgttgtgggaatggacaggaagggagtgggtctcctccggtggagttacagcaaagaacgggggactttggggcaggcacgtgctttggttccaggatgcactattgttattacctactatcttttaatatcaccttctagttcacacgatctcattaaccatcagaacagtccagggaggtaagtcggaccattcccgttttatagataggaccccagattggtcaagtggcttgtcctcgatcacatagccacaaagtgggagggctgaggctcaaaacaggtgtctgtgagcttcacaggcggtaaggccgtgtctacatggccgggacatgcatcccggggctgcccctgccgtgctgcccgagtgcacgggggatgaggacctgacaaggccattgatcttgcgggagcttcctgaactactccagcgtgaaaatcttccagaaggattctccacagggcaatgaggcaagaaatttacagcttagcctgattaatgggccaggcagttaagagttctttgccaagctatgagcataatttatagtcatcacggcaggaggaaaggccacataactcacatccttaaagggcccttagaacaagagacacgccggatcattgaaaacgtctccactcctggcgccaaaagagatcggcacgtttctgggtattctggtcaaagaacagggagtctggattaatatacacggcagaaaaaagcgaagaaaagacacacaggtcatatatttctgactgatattccgtttgttgttttcggagggacttggtatttatttaaccacattctcacttgacacgccccctccccacaccttgtaaatgccttcctctttagccgagtcatttttcatcacatagaattgaaatgttgccaggaaggcggtttatgagattgtagaaatggcactagagaaagcagtgtgaaaagaggcctagaacgtaaaagtagaagatgcagtttgattcctggcccttttgccgtgggctgccatgggaccatatcaaggtacaattgccatgggaaaatgattttaggaacttcccctgatctctctggacctgtttcctcctctgtaaaagaaagagtttggacaaattgtcctctctggtttgaaagttgtgtgaattccttgcaatctgacaaccacaatcttatcattactcagcatctggaagtaatacttccctctgaaacccccagagcattctttctatatgttaaaaaatgatatttatcactttgtatctcaagttctagttatttatgagcatttatttttttcttattcctccccaaatggactatgagtgcttttggcaggctgtctttttcatccttgaattccccaagccccagcacagtatctggcctgtgggtgtcacctaataaaactctgagtgtgaaggacaagcaaatgaatgagtagagatggtctctgctcactctgtccttaggtggtatggcttgatttagagtttttcttacaaagcatacattctttctgtttgatataatttatgtgtttcaaaatgaggagtcagaaatagatttcatttttgcaagatactattattttaggagaatcgtatgaaaatcttcccctgtggtgtctcttttccccacatcagactttgaatcaaagcaacatgcttttcaaggattctgcaagatacagctccacaatttccatctcggtggctttcttcttcctgctgattattcaaaaacaatccaccctcttactgtggagagaatatgcccactgatgttgggcctgaacaggtgggctggcttaggcccatgcaatggtagcaaatggcacgcaagcagaggccttagatgtactagtgtggttttccttgcctcttgtgtgtctgccttttatcctgaaaagaacttagagaagagaccagaacccaaaatgctgcctagatcagcccagcacagttgacctgcaacacggtgataaaactgtcatgagatactgggtgttgggactgtctgtcatgcagcattattgcagcaagaattgaccaatacagttaccagcagcagctggtaccagggtctgcagcaacctcaattctggcttcctcagaagacagagttctactgagggtcataagacagagggagagaccaaggcaagttttagagcaggagtgaaagtttattaagtttagagtggaatgaaaggaaggaaagtacacttggaagagggccaagcgggcaacttgtgagatcatctgccctgtttaaccattgactgggggttttatatgctggcatgcttctggggtcttgtatctcttctccccgattcttcccttggggtgggctgtccgcatgcacagtggcctgccagcacttgggaggggccgcgtgtgcagtgtgtttactggagttgcacgcatgctcacttgaggcattcttcccttactagttgggtgttcctagaaggtcacctaccagttaaactctgctattttgcctcttagtgcacatgcctgagcccactcaccaactcctgatcaccagtttcagttttttttctatctactgaaagactgcctttcccggccctggctgtgaccaatggttatttgagagagacagttaccagccgcctgaccatcacctagtggtcacctgacattcctggtgggggggaccctctcctgccccgctcatgtctgactagctaacaactgcaacgatacttctgatttcatttcatctttgcatgtgtttactttccccaccaattctttatctcattttctttgtgccttttgagatagagacagatgcactgcttggcttggacatctattttttgttttgttttgttgtgttttattatactttaagttctgggatacatgtgcagaatgtgcaggtttgttacataggtatacacgtgccatggtagtttgctgcacccatcaacccgtcatctacattagggatttctcctaatgctctccctcccctagccccccgcccccctaacaggccccagtgtgtgatgcttcccttcctgtgtccatgtgttctcattgttcaactcccactcatgagttagaacatgtggtgtttggttttttgttcttgtgttagtttgctgagaatgatggtttccagcttcatccatgtccctgcaaaggacatgaactcatccttttttatggctgcatagtattccatggtttatttgtgccacattttctttatccagtctatcattgataggcatttggattggttccaagtctttgctattgtgaacagtgccttgtttcattgcccaggctggagtgcgatggcaccatctcagctcactgcaatgtctgcctcccgggttcaagcgattctcctgccccagcctcctgagtatctgggattagagacgtgtgccaccactcccagctaatttttgtatttttggtagagatggggttttgccatgttggccaggctggtctcaaacccctgacctcaagtgatccgcctgccttggcctcccaaaatgctgggattataagtgtgagccaccccacccggccggacatgtatttttttatagcgacagttccatcaagcagcttctgcagacacaagcccgcagctggagaactgagtttggcatctctcattctctacggtcatgtctgcacttagtttgttgttctttatactttaaaataatttgaaacataacctctggaaatgttacataatttaccaacgtctctttaaaaatcgacacttccgtcatacatcacattttatggaatcagaagttccagatggctcttccttgctgaaacaatggctaaaataaaccctttcatataggattaagaaatttgaaaattaaagtagatctaaagtaaaggcatttgtttttttaaaaatgagatgaaattcacataacataaaattaacccttttaaagaagggcattagtagtcttcatctattctagtaggtagtaagctacttctttcattttaagttttatgacaaaccataattcaggtaggccagagtcagaggagggagggaaaggggagaagaagcccagagcagctggagaaaaagcagagaaggtgggaggactgagaggggagaaagctgggggagaaagctggggaagaaagaagctccaaacgatgagcctgtggctgccttctgctcactgccctgtgtgttgggggggtgggggcatctaaagcagaccccatgctctgtgtgttctgggggtgcactaatgctcccccaaaaccattagttaaagcaggaatcggatagccatattcccagctgcatatcattttggaactggtggaggaaaaatggaactaacgacgtggtttttaaggcaggaggttaagacgttgaaagtccttggcttggacaaagtctaaaacttatctctttgctcaggcttgaggcaggatggctcctcatcgcccccctcccacagcacgcacaccctccggagatgggatgggccacccttgtccgtccccgcaggccagtcccctgctgtctgctgcttggatctgacccctgcataaatacgcaagcatgtgtccctgctgtggtccgggggtccctgtgggggggtccctgagactcttccgggagtcatgcaaggtcaaaacgatttttcatagtaatcctaacgcggtattagctgttttcactctcttgcatgtaacgtggagatttccagtggccccatgacatgcgagggggaaacagattgaaggcagacgcagacctgggatccagctggctcctgttcagccagacacgagtttgcaaacatttaaaacaatgccattcttgcacatttttttctttcagaaaatatatttacatttcataaaaatgttattcatatgaacctgtaatggcttttatattttaaaaatgtctctgttgtaacatggtaaagagtgattgctgtgccccacattcacaaaagctcgctggagtctttccaggactcttaagaccaagaagcccgaggactgttcgggagcagccggcagtgtttctgcagtttcctgctacacatcccacgtgaagccttgtgcaaataaaaagattgcaggagggccccctgggcggtgtgcaggctctgctctgggcgaaggcctgaggggcttgcgctgccgctttggctctcggtgccgcgccttcccagtgctgggccttgcaggccgcctgcctgggaccaccccctaccctcacaaggcctggtgccttcaggctgccagccccagcagcaccctgaggcccaccaagtgggcatttgcactgagaggctgaacatacaaatggacaatggtgagacaggctgcataaaaataaactctgaccacaacctctgcagtgacctgctgggtagccagtccgcgagctctgcagctgttggccccaaatggccaggacttggtcatcgatggccagcttctgaagttttgccagtgcttccaactcaggagcacctagtaaaaggcaatgactcactgtaacccttcccagaggatgccctgctgcggccagcttccctgcaggacagccaactgtggcctccccttggtcactccgcctgtccacacctgacttggctttgagtctctgccacaggcaactgtaatgggtagcactgtgtcccccagaaattcatatgttgaagtcctaactaaccccctgtgacacagaatgtgaccttacttggaaatagcgtggttgcagatgtagttagttaagatgaggtcccatataactagtgtccttataaaaatgggaaatttggacccagggacacacacagggaaaacaccataagaggatgaaggcagagcagggctgatgcttctataagtcaagggggacaaagactgccagcatgcagcagagccggggacaggccggggggagatgcttcccagtgccatcagtggcagctggcagaccttaatcttgaacttccagcctccggcacgtttgtgcaggccaccaagtctgcagtactttgtcacgacagctctggtcagcggcagtggctgacatcctggctgcagcaggcttgtcctcatctgggtgggcttcatctatctctgcagcccccacacccctgctgcgggaagtacaggccttgaggtgcagttcgcaggaccccaggctttgagtcagttttggagagggcaaggctgatggaagcctttttgtgggctgcaggtgttcagtcttagagacatggcctgaaggatctcctgacatggtccagggaggcctccgtgccgtctgccttcatctctgtgtcacccagacccccctcgaggcggcctgggcctgggctgcaaaccactgagcaggtctcagcctcaaccccagaagctcacaagtgggagggagccctggaagcccgtggtggtgttttgattcccgtggtgtaaagagcctggggttggctcagaggtctttatttggccttgcgtgtgcatggggaaccagcgcctcactcctcccatggcaggccaaggccgactggaaaggagttattttgagatcagcacagcctgtacagataacagtaatagtatttcactgctaaagttgtgtgagaaatgttgggttgggggagaagaatggagatgagtttaaaaatagaaggctgtaattagccaagcacggatttgttctagaaggcatcaattactacggcaaccacacggcccagattttccagggcggtctcattccatgggaccggattcttttcagtaaatgtgatcggttccacgtggaaaagtgatttgctgtcatggaggtgtccgatgttacacataaattaattcacaaatccaagccaatgctttgtcctatcaggactctctttattttgttattaaaatgcagtcattttgcctgtggtcttttcctacaggttaagaactattcatgtagataagaattcaggaaggtgtgcgttgaaagcggggccgctgaaggagtgtaaggaggagagtcagacaaactttttggttgcagtgctttccatttttcattttggagacagtgtctgcactcccaggctggagtacagtggcgtgatcatagctcactgaagcctccaactcctgggctcaagggatcctccctctttagcctccccaaagactgggactataggtatgtgccatcactcacagctaattttttgattttttatggagaagagggtctcactgtgttgcccaggctgctcttgaacttctgagctgaagagatcttcccaccttggcctcccaaagtgctggaattacaggcatgagccaccactgtgtctggccactttaaaaaaaaaacttttttcttttttaaattttagagacaggatcttgctgtctcctaggctgaagtacagtagcagatcatagctcactgcagccccgaactcctggcctcaagcgatccttccacctctgccaaatagctgggaccacaggtatgcaccaccgtgcccagctaacttttttttttttttgagacggagtcttgctgtgttgcccaggctggagtgcagtggcgcgatcttggctcactgcaagctccgcctcccgggttcacgcctttctcctgcctcagcctcctgagtagctgggattacaggcgcccgccaccacgcctggctaattttttgcatttttagtagagacggggtttcaccgtgttagccaggatggtcttgatctcccgatctcatgatccgcctgcctcagcctcccaaagtgctgggattacaggcatgagacaccacgcccggccccagctaactttttattttgtttgttatagagatgggctcttgctatgttgcccagaattgctttacatttctaactggacatacacccaaggggctggtcacaagtgtttgccacatttggtatagtacatctcacagtatgccacagacgctccgcaggctacactcacacaagctgttctgtgcatgggttattatggcttgtgtatcctgcgtgcccatgaagtgccacacgaagtgtgtactgaaagggatgtgtgtgaatgcctcagaggccagaggcagagcttggagccagagagatgggagcgcctcaggaccagagctggtggagtcatcctagccgcgtgggataggaaaccgtattttctgttttctgctttggttctcagagaaggcaacggttgtgttgggccggtaggtgcagggggaagtatgccagcagaagtctaggagtcaaggaccctggaggtggaggtgaacggagggacacccactcactgctggtgagcgggcatcttagcagtagaaacctacattttggagacttggatattgttgctatttatagtttcaatcatgattccccttagttttctccatcttttgctttattacttttttttgcaaatgtcagctaattttagttatactcgggataaggcgattggaattttgatgggcatggtagaaatcagagttaaaaacaacaacaacagcaacaacaagcagaactccaaggggaaggtgaagcttggaggttaaatgctgagagccctgaagatgactggagcccctgctcccattccgcagcatctcctagccctcttccctgcttaacctttggagggtcttgcacttttgttttaagaggaagctgttctgtgttcttcacagctgattacttgctaccaaggaggtggcatctccaaaaacttgccttcaacactggtttgtggctgtacaacagtcaaacagtttctcaaagtgtgctttgtggcccgtcagcacctgaagcccccaggggcctgtcaattgcagaattccagcttcctcttcagactgactgcatgagtctaaatatctgagtggctggacctccagatcttcattttcagcacacaactacttaatttttcagcacaccaaagtttaagagccactgctgcaaaatctcagcaagttgagctgaactctgaactccctcttatctccacagtccctaaatggggagtatcattttcccagctccaaggcgacatgcctgaattccttcagcttgagtggcgtgaacaatgtgggtgcctttaaaaggctaacatgctgccaaaagataaccacaggtggacatggctctggatgggactcaaagatgtgggttgtttccaaagatagcaataccaaacccgtgctgatgactctgtgtgtctatatgtgtgtgaagctgaagagccttatatagcgaggtgaggccccaggaaggatttgcggagtacagtgcgttccgcacgctcttgaacgtgcgtgttctcagaactctgatatgtgtgtctcggcagctgatctgtaaggaggtcaccacgtgtccacatctatctttgcagactgccccatccagcttagtgaacagctgataaatgcctgtagcaagcagagcgaggcagctgagccagaacttttacaaatgggagcaaacatctgccgtggttgctcgtggtagaggggctgttattagtgttattacagttggggatggataaactgcggagcctcagatggttctgtggagatggaccaacaatggcaccacaggtaagaagaggaaaggcacacccggcagccactccctcttgttcaaatgttgttctcttggttgtttgttgattctcccattgtattagttcattctcacactgctataaggacatacctgagactgggtaatttacaatggaaagagatttgattgactcacagttccacagggctgaggaggcctcaggaaacttgcaatcatggtggaaggagaagcatatgcatccttcttcacatggcagcagcaaggagaagcacagagcaaaagggggagaagctccttataaaaccatcagatctcatgagaaacgcactatcgcgagaacaggatgggggaaactgccccccatgattcaattatctccacctggtccctcccatgacacatggggattatagggactacaattcaaggtgagatgtggggacaggcacggtggctcactcgtgtaatcccagcactttgggaggctgaggagggcagatcacttgaggtcagaagtttgagaccagcctggccaacatggtgaaaccccatctgtactaaatcccattagtatataaattagtctggcataaaatataaaaattagtctggcatggtggcaggcgcctgtagtcccagctactcgggaggctgaagcaggagatcacttcaacccagtaggtggaggttgcagtgagccgagatcacgccactgcactccagcctgggagacagagcaagactccctctcaaaaaaaaaaaaaaaaaaaaaaaaaaaaaaaaaaaagaaaagaaaagaaaagaaaaaaaagaagaaagaaagaaaaaaagagatttgggtggggacacagccaaaccataccacccatcaaagcagggcactctcttccctcacctgctttacttttcctcaaagcacccaccatcccctctggcataaacgcctggatttattcccagtccccttcctggaacatgaaccctaggggaggcttccgggatgttctgctcacacatgggaggagctcaaagagcctttgttgattgaatcgatgatagacaagctatctcagaggaagatttgaagtgactgggagctccttctcaaccctctccctgagacctgctcacagagcatgaagtctaaattctggctctgaatgagtctgagcaacgcctgagtgcccagcaacctcagctaagcacagcaagtttcggtttgtggcttcctccctgtgccgagcagatcccatccttggggagtccccagccggtctccacagtgtccagacaccacggttctcatgaggctctaccctccctgacttccactcatccaagggcctccaagtcttcaaggccagctcaggcccagccctccaagaaacagtttcttctgatgacaccaacccatcctgatgtttcctgattcccagttcctatgggctccaggcctattgcagtccagggctctgctactgaagctctgggtctcaccaagtgggaggtatgactgttcatgggatcaacagaccccagagtccaaggtccagggctcttagattaggtagaatctggtaagatagtaagatactaccagatactggtcaggcgtggtggctcatgcctgtaatcccagcaactcaggaggccgaggcaggcggatcacgagatcaagagatcgagaccatcctggccaacatggtgaaaccctgtctctactaaaaatacaaaaaattagctgggtgtggtggtgcatgccctgtcgtcccagctacttgggaggctgagacaggagggtcgcttgaacccgggaagcagaggttgcagtgagctgagatcgtgccactgcactccaggctggtgacacagcaagactccatctcaaaaaaccaaaaaaccaaagattctaccagatactacccacagtgtaccccatgcataatacctagtacacagtagagtacacattaggtgctcacaaatccctgttgtttaattattcaggctccatctccataggtaccatgatcagttttttcacacattcctctctttagggtcacagtatgtgaaagatcccctgatgcattttttaaacattttatcaaagtaagagatgcatgtagttgaagaactgtgtagaactgaagggcacggtatggtgagaagtggtgcctccatccgttccttacctcccggaagatgacgccttcctcttcaatcttttaaggaccctgtgagtatattaggcccacccagataatccaggaccatctcctcatctcaaagtccttaacttaatcacatctgcaaagtcccttttatcacagaaggtaaaagtcatgggttccagggattaggtttgggaccaattattcggccaaccacctccgtgtgagcgaatgccattatttcctgataaacccatccttcacgcatcacctgccgatttcctattacgagaaggatttcactcttgtatctttacctcacttcctctcccatcttctcacaatgttattaagaccctgcaaccatccttcccagcagagccagctcatgtactatcatttcatgtcctttcttggaggggattttctcctacagtggagacgcttcttcaattttctggctgtctttatctctgtcctgcagtttgctcttatcatgttcctgtccttctcctggaaccctccctctggagtcctccaactttgtcctctgggcacctcacagcatagtggttgggtgggtttcaaccattgagagatagagacagagagagagaacacaaacacgagaatactgagtagagtcctctcacctttttgacccagccttggcagtcacacaatgtcactctggctatactcttcttccaattctattcacagaggccctggtacgttcaaagggatggggaaacagacactatctcttaaagcaggggtaatggtaacattctagaacatgtgagaccagaaatgttacagtgggcaactgtggaaattatcaatccaccctacagcagaacagtctttttttttttttttttttccccaagatggagtctcccactctgttgcccaggctggagtgctgtggcgcaatcttggctcactgcagcctccacctcccgggttcaagcgattctcctgcctcagcctcaccagtagctgggattacagggatgcaccactatgcccatctaatttttgtattttttttagtggagatgggatttcactatgttggccaggctggtctcaaactcctgaccttaagtgatctgcctgccttggcctcccaaagtgctgggattacaggtgtgagccactgtgcccggcctggcattatagtctttttctcaaacaaaaatctgttttctcagagagagactggtgctagctgaataaaacattattttcaactccatcccgcttgcttttcactgtctacccacataccgtatacaactttgtcatgaggctttaagacaacttttctctcttgttatctccacccctcccattattttcattttatatgaccttatcttttttctttgcttagtattagaaaaatagcttttaaaatgaagaatagtattttttcttcaaaggatgcatccagaaacagttgcatttcctgaaagtcctttatttttttaaccacttcaaaaaatataaggtctttgggacagatttttgtgtaaccaaaaggctgatgttaggatgatggccaaactgtaaccactccctgtcacccccttggcttgttgctcttgttttaaaaatcattcttttgagaacaaatacttttaggcaatctaattacaatatgatatgtaatatttgaaccagttgaccaaaatcaacattaaatccaaatctcacattatttaggcaaaaaggagacctaatgcattacattacatgtagatttcaaagttcttacactattaaaacagtgagaagacagcaagggttgcctgcaggccacacagcccctctgtgatgataccttacgagtaccactgaagatgtcaaaagccgctttgagccttcctggtgcaggtgctgcttggacattatgaggcttcactggctcatctcagcccatgttcacagagcttactgctgtctagtgcttggggagcctcagcctcatcaatggcctgtgttacgctgccgtggagggtgtccaaatgtgctttccactctaggtcaccaggtacagtagtgcgtgccaggcactgagcaactctaggggcaccattctcataggggtcatcctaggtcagtttcctaacaaatagtagaatttatctctagcaatgggagccttttctagttcatgccaaggtacatgctgcctggagggaaaagagcactgttcctgcaatcagttaattggggcataatcctgcagctttcgtttgacgaccctgtgtgtattaagtttcctagggctgctgtaacatacaacagcctgggaaacaacagaaattaattttctcacagttctggaggctagaagtctgagatcaaggtgtcagcagggttggtttttcccaaggactatctccttcgtttgtagatggctattttttccctggctcctcacatggtcttccctgcgtgtgtctgtgtcctaatctcttcttacgacactagtcatattggattaggacccacctttatgacctaatttaacctcatttatttcactcttatttgttaagagtcagagtcttgccctgtcacccaggctggagtgcagcgccatgatcacagctcattgcagccttgaactactgggctcaagtgatcctcctgcctcagcctcctgagtagctgggcctacaggtgcgcaccaccacagccagcttcatttatctttttaaagacgctttatgcaaatatagtcacattatcaggtactgggggttaggacttaaacatacgaatttttggagaacatatttcagccaataacactgtgcctcaagggccctaatctttaacctagggaatataatgatattcttacagaaaatcatatcaaagtgctttgtagactgcaaagggctgcacaaatattgtgtggttacttcctgtgtcctgacaacttgtgcctggatccctgatgtgatcatttagatctggtagaaataccaggtggagtcagcctcctaaagatggaacagtgggtaacaggtgtagaagctggggcatgaggtggtggcgtgctctccttgcatgaaggccctctctcccctgctgctcccgctgttggtgctgatgttcagactcatggacagtgagccctacaatgtgtcatacccctggggctgagggcaagagggaaagggaacaatggcccacaccaaaatgtaaaaggccctccgggagttctggtgtataggccctccatgtagctggaaatgatggccacaattcctcagacgcctgccggctctttcttccacgtctttagtaggggatcaacaaggtcacttactgtagggagtgatttactccgccttccctggatcacatcagattgattctaatcagatatctatgtactgttactccctgaacaagcatttggcagtactggtagtggggagccaagatggatttaatttcctttggccgatatgcttcattttcatgataacatttctcaaaacttaacggaggggctcttgatttctgaatctgcccttttttctagaagggtaaggcaggaaggtaagatctcattctcagatgattaagaccagcaccctcctgcagtatccacgctcccaccctggggctttcctttgaaatcagcaagagtctgtgtagatgaagagatacgagtcaggagcaggtccacatagaagcggctttcccatattaataataatgtttcacaataatatcactttgggtgcttcctctactccttggagccatagatagtggatttattgacttgttttcctttgacttatggctctttctcgttattttctgagtgtggttttgctttgcttcctggaaagggaaacagaagtggttctggtgaatcctgggagagtagagcctagttttgaactcttactctcttgatgacacggctgctcagagggaagcgtggccagaagaacatgttggagttccttgctcatatccctgtgaatatggccacatgtggctctaggcattcagtgggttcatgcagtctttggaacagaaccccacaaggggctgacaaacaaccttctaaggcttggggagtgctgaactggacaaaccagggtttagagcttcctcagtgacatgcaccgagtggatccagtggcccctcttagagtctctccaaaaggaggggggcccttcttcccttttttgcatctccacttccctctccctagggcccagtgctttgtctgacctcctctcccactggaaatttagaggttatgtgcatttcatctatcaatgaatacaaagaagatgattccgaatccgagaactgctaaaatggaatttcaggcatttccagggagagtttaaatggtagaaagggctggatttaccattagtggctattagtttgattctactaagacagcatttctattttgctgttgggactgaaacaaacctcattcatttgacatgaaaaaagttgggacagttttggtatctccttagctggctcggttaagtgtatgtgagggagaccatttttcacgcctggccggctctgtgcttaagtggccccatcgcagccagagtagcctcattacagctgaagtccctggtaggtctcctccttcctctgagcccagcgcagtgccaaggccggggactctggctggcactggtgacacgctgtcttgtcctgaagacacgaggttgggttcggcagctggctcctccgggacagggcccagtgcactgagcttagctgagcccttcccctcacacctgaagtgtggcacgaggatggtcactcagaagcagcgagtagggtgtcctggtgggaaaagcctggctttgtgcagtctcggggaaggttttcaatgccatctgagcctgtttcctcatctctaaggcagggaccaggtagcccgccccgcagggtagttgcaggaagcagacatgtatctgggagcagctggcgagttcctggcatgcactgctcccatccgatttccgcagatttcctgctggaacgttctctcgggcctcaagttttcctgagaggacgacgtggagagtggagacaaagatgctcaaaagccaggaaatcgcaggctcggaagcccccacgcatgcctctgaacgcagcgccatctcggggctgcggcgggaccaagcgggacgcttgcaggctgtcggcggcgggggccgcgagccgccggcgtaggccgctccagctggaagaccccaccgctagggttccagggggctgcggacgcttccgaggggcccaaggcgaaagaacgcagcccgcttgtcggccacgtgaccgtccccgtccgcgtccgcagcgaccacgtgactgtgcgtccgcggcgtcgattgactgggagctccctggccacgccctaagcgccagccccgggcttcggggggcggtgctgctgcggttgccatggcgtcttccgagcgcgcaggcgtgggcccagagtagcttttcgggtatttgctaccggctctcggtagggctggtcacctttgcttgctgagcttcgcgccctgcgtcctttggtccccagcaacttgcagggcagccgtccctcatgaggccctccagcgaatgccctaaagctccgaagttgctccggaggaaaacaggcttgctccgagggtgcacgtccttactgcccgtgacgtcgtggtgccttgagggcacccttctgggaagatccttgcagaggccatgtcccctctccacgacatccaagcccattcccaacttgcttttcactcctgtccccccggggaacgtctactggaccttaggacagcccctcacccccgtgcaccccccaggtggatctgcagcgaaacctctgtggtgactcacagttgctagcattggttatcttcttcctggcagaaggtggcaggctgatgctgtcgtcgttcctgtgtgtctgacaaatcacaaatatgaattcagatcgtcacagctgagtcatgcccaggatttccatgagccctgctggggtggccagcttgagctcccttccccacagcctcctccagctctgcagcgccaggcaccagtgtgactcatgggggcctgtggaagccggggctgctcagtggggctgagtctaggagggggagagagagaaagggagcccatcaacaattacagtgcaaacgccgcagctgccaccaccgagtgcctccagttaggaactggtttgtgaaattcattaccctatgagacgagttttatctctgtttcactcaagaggattctgaggctcaggaggttgtgaatgactcggggaagcacagctggtaggtggcagggttgaaatttgaatccaggtcattctgacccaggagttcagactttttcccagcccagcctttccactcgacctcaattagcacagtcatgctgggtgccaaagctatttactttgcttgcgggagtccaggagctggctcctaatggctccatttgaaatggttttttaggcaaaggagactagatgaacgtggaggagagggaaagtatttaggcgcgaagatgctacagaacaggcttattccagtgcacctccaaacccaggcgtggtgttcttccttctcgtgccttacttttacatccccagccactgcttggtatcacctggttgtcctctgggcacctgaagctcagcatttcccaggatgaatatttgcttttccctgccatatctgtctgccctgagtgagtcagtatcagcggccatgtgaccgtccgtgtctgcagcgtcctccccccatcccaatattcttgcaggcagtcaggctttgaagaccaggttgtctcttgttaacttgaaaatcacacaatctagaaatttggaccaggagactttctttctttcctttcttccttccttttttttttctttttttttttttttttgacaaagtcttgctctgtcgcccaggctggagtgcagtgtggctcgatctcggcccactgcaacctctgcctcccgggttcaagcgatcctcgtgcctcagcctcccgagtagctaggattatgggcgcccgccaccatgcctggctaatttttgtattttagtagacacagagtttcactttttttttttcaaatagagacagtgttactggtggagggtgtccaggttcttggcgtcttgtacaaagaactgggcaaaacccacaaacacagcaaggaaagaacgaagcaacaaaagcagagatttattgaaaacgaaagtacactccacaagatgggatcagacccgagcatagggactaagagcctggtttcagaattttctggggtttaaatgccctctagaggtttcccattggccacttgctgtacacccatgcaaatgaagtagtggcttgcaatctactgtaactacaaagtgaagttacaaaggttacacactatgcaaacgtctgattagttgtggaaagcaaccaatcagcggctaaagtgaagttacaaagttacacttctatgtaaacaaagacttagcctgcaatcagtctgtctggttgtagaaaatgggaaagtatggagggtttatctctggtccttttgttactttgttgtggaaagttggggttttccttttgatttagttctaggaagtcaacatgagttggccttaggttccctgcttctagaccccattctcctgcctcaacagggtcttactatgttggctaggttggtcttgaactcttggcctcaagcagtcctcctgtctcggcctccctaagtgctaggattacaggcgtgagcccccacgcctgcagaggagactttatttcttataaggggttataggctgcagggtggccatcctgtaggctgggaagagcctccttcaaagaccagagacaggccctctgggggaagaaggggtaagtcagaaatttaagttgaacatgttgaccaaatgtacatattcaacagattatcagaggagatgtgagtatttatgaagggggtcctgacacatgcatattgaacaaacatgcatgtaacatacaacccatgttcatttggggtggaaaataacatttgaatgtattacaattagcccctataggtcaaaagttccttttgggacacaaaagcactcaagtgtgcaccctctgtaaactggctaggactagttcatgattggattggtggtgtctcatctagagaaagttactgacatcagtgtcttgtacaatcaaaggtgtagttatggctgggcagttagtctgtgccttatctgcgtgagctgcaaattgttttaatattgcttatcctgagaccagtgcttatttagacggtagagaaaaagaaaaattctgtggctgttagaacagaatttattctttaagcatagaggtgagtgattcaacccttgcttggtgtaaggaacatggttgtgctttggtcaaggataggccaaggtgggatgtttacatcctgcgtgactcagggagtttagagcgcaggcgtataactccacttgttatcgcatccacggagccataacatgggaaggccgtcccttggcattaagccactattgtctgtaaaaggtataattgccctgccgacactgtacaggtgctggcacccagagaaagagagagagccagagctgtccatctttgcagatggacagaggggaaccaggacacagcttggctcactggcgcccagagagagacagagttaagctgccaaccttgaaggcaagggagagctggctgcgcagctgtgtgtgtgggagctaccagactaagcagccgagacagggcggacagtgtgagaaagctgttgatgaaagctgctgttgaataaaaccatattcacctgcctaccaccccatgactgttctttctgctcatctacccactccctttggacctcagcatgggctggaacctgaccccaagtgtgacatttggcatagttgtgagcctgacacctggcgtggccataggtcttatttatagtttgatgtcttatttatagtgtgatatcttattgtcacagaatctgttgtcctatgatctctattttagcattaatgctcatcagctgtgtctaaaccgcaaaatgggaggcattaacgaggcatgtctgcctgcccatcctgtcatggctgggaactcaatttttaaggtttttcaggggtccctttggccaagagagggctcgtttaatttgtggggaggacttaggattttatttttagcttacactctgaagctcctgctcacatccaattgtatgaaaacaagcttttcatgtatttcgtctagtaatttttttaaattttttgtttttgcagcagaaggattcctctggttctccatcacggccagaagcataatttgatgacagcatttttttttttttttgagacagagtcttgctctgtcacccaggctggagggcagtggtgtcacccaggctggagggcagtggtatgaccttggttcactgcaacccccacctcacaggttcaagtgattctcctgcctcagcctcctgagtagctgggattacaggtgtacgctgccactcccagctaattttttgtattttagtagagacggggtttcaccgtgttgcccaggctggtcttgaactcctgagctcaggcaatccacccaccttggcttcccaaagtgctaggattacaggtgtgagccaccgcgctcagccgatgacagcattcttttcgatcattttcttttctgctgttcagacactgctaatggcttgtagtttcccgtgatactaatgagacaggctagtttattagtgttttgttctcttttttctatctcctccccatgcccattctgagcagatagctgtactcttcacatgtccttgcttcaagaaactggttgaagaccacccttcgtccagccttgtgtgagtctgagcttgttgaagagactttgccacaagtttagtggtgggagagggggaaaaggagtgcttttgaggtctgggaaggagaagaagatattttagaaccgactctcacacctcgtgcctcccagcagggcctcgagggtgtggtgagacaccaggaccacacagccttgggaccaaagctgtgcctgatgtgatacaggtctccataaaggtttgccaaacaagcaagttagtacttacaatttcccatgactgtcactcagattacgtgtgcctaaataacttgcccatcgcttaaaagagaaaccccataaatgtcctttgatccatttatgcctcaagactgttgtcattgtcattgtcattattgtcatgttctcaaatatttttgcctggagagttttcctgtctgaggacttttcacatgtagaagaattacttctcattcttcctgttgaaattactctcaaatcttttctgacagagttgcaaacacactgacagctcccgaatgatctgatacaggatccttaataggcatggaagtgttcgccagacagaggggtcctgcccttgctgatctgagctggttctgtgttagagactccgtgggcgtctgtttgacaggatctgccaggagctgaagaataactttcctgatctggaagagcaaatctcagatattttgcacatttgcaggtattttaaaacagtttctgtaagatgccaacattacttttccagtattttgaagttctccagtgtttactgagaagagctcagttgtgtttataccgaatttcaggtgggtttcttgaccgcgcctctcacttcatcaccagctttgctctgggcccctaactgtactcctcctgagggtcccgcggattcaggtgactggtgcccttcaggtttcatttgtgaggacctattcttcttcctgggactttggcttgtgtctttcttctgctaaaccaaatttgccacttcctctaagattctgttccaaactctctcatctcaggaacgtttcctgaaaacccgactccctgtgctgatttttcctgatgagccttccctatgcccttggtaaaatgaagtttgacaaacacaactatgtttatgaacatttgcattcatataacttttctcttctcttgaattatttgcttaataatcctccaggagtgaatttactggatgaaagcatttcaacttttttttttttttttttttttgtgagataaggtcttgttctgtcacccaggctggagtgcagtggcacaatcataactcactacagccttgacctccggcttcaagcagtcctcccacctcagcctcccgagtagctgggactacaggcacacaccaccacacccagcttatttttgtattttttatagagacagggtttccccatattgcccaggctggtcttgaacttttgggctcaagtgatctgcctgacgcagcctccccaagtgctgggattacaggcatgagccaccctgcctggtcgcatttagacatttttatgggtgattgaattcattcattaaaaaagtatttgttgagcatctgtagggtgccaagactgtgctggtagctagggtgtgacagtgactcatagtgacctcttatccttcctagaacctacccctaggagtgggagaagaccacaaccaaagaagcaaatggacacacggactatcagatgaaaggcagctacacaggaaaataaagcagtgcagcaggattggaggtgcttgtggtgagaggaggtagggagttgctttttacatggggagatcagggaaggcctcagtaaggaggtgatatttgaatagagagagacctgggagaggaaagagagtgagccctgttgatatataagggtagaatgactctggcagagcggttagtgcaaaggtcttgtggcagaaaacacccttttggacttccattgtgaatgtcttgggacacttgatggtgtcccacaggtctctgaggctttgtttgtttatttatttatttagagacagggtcttgctctgttgcccaggctggagtgcagtggtgcaatcatggttcactgcagcctcaaactcttgggatcaagtgatcctcccacctcagcctcctgagtagctgggaccacagttgcacaccaccatgctcagctaatttcttattttttgtagagatgaggtcttgttttgttgtctaggctagtctcaaactcttggagtcaagcaatcctctctccttggtctcctaaagtgctgggattaaaggtatgagccactggccaataaatcattttaaaaaatcattttttccctttctgttatggactgaatgtttgtgacccaacccccgaattcatatgttgaaaccccaatccctaatgtggtggcatttggaggcggggtctttgggaggtaattgggtttgaatgaatctcgaggtggagccggtgaagggattggtgcttttataaggaggtgaagggaccagagctctctctgtcatgtgaggatatggcaaggaagcagctatctgcaagcttgggaccaaagctaagaaaagactatgctgccactctgatctcagactttgagccttgagaactgtgagaaatacagagttatcgctgaagccaccctgtctgtggcattctgttgtagcagctggaactgactaagacaggttcccttcttcaacctggataatcttagtggacctaccttcaaatctgctgttgagccactggtgaatttttcattttggttactgtacttttcagctccaaaatttatagatatatattttgacaatttcttaatttctgtctctttattcatgttctgtatttggtgagacatgggtctcgtactttcctttatttctttagattgggctttctttaattctttgaacgtacagttgtcctttgatatctgcgggggattggttccaggacccctggggataccaaaatctgtagatgctcaaagtctgttgactctccctatctgtggattcaaccgatcgtggattgaaaattgcagtgcaggaatgtggataggaggactgaccatacgttatttgtaatagctgacttgacatctttacatagtcagttcaacatgtgggcctccttagggacagtttctgtctgtctttttccccccatgtatgggctatatgtcacgtatctttttatgtctccttgtttttgctgttgaaaactggacatatgacataacataatgtggttactctggaaatcacatctccccaggctttgttgtttctgctgtttattgaataatttccctggataaagggtgtaaagtctatgttctttgtcacagatgattacgaggagtttctgggaacttccagacaggttagacaataacaatctttaagagtaggactttcggggagtttcactccctggctcccctgtccagcggctgccagctttttgcatttacaactgctgtggagctgggaagaaggagatggcaacagggcaagttaaaatgctgcacagctcacagttctgtctgagattcagtcatttttcttgaataaatctccaggaattgttgcaagcctttagttaatttccacagttctgaaaagttgatttagacaattttccatcattttcagccacagccaatttcaccattcccttgaaacttgcatttattttgcttacatccagatttgcaaaactccttgctcactgttcactagatcccgtcttttttttttttttttttttgagacagagtcttgctctgttgcccaggctggagtgcaatggcggtatctcggctcattgcaacctccgccccctgggttcaagcaattctcctgcttcagcctcccgagtagctgggattacaggcaccaccaccaggcccagctaatttttttttttttttttttgtatttttagtagagacgaggtttcaccatattggtcaggctggtctcgaactcctgaccttgtgatccgcctgcctcggcctcctaaagtgatgggattacaggcgttagccaccacgccctgccaaatcccatcttaattcaactcacctgcacgctttcagacctctcttggtctttgcccctctgtggtaactattgcatttctagaacactggacttaattcccaagcccttcttcacatccaggcattctaggacaggaagaaactgctgtctgattctataattatcacactttccatggctgagtgaagttttgacagaacttttattcaaatgttatacccttgttaaagcaaactaaatatggcttgagaaggactccgtacttctatattttagtccttgtggatgaactgcaaactaacttcataggtagacaagattgagaccctgatttcagagtatgcacacctgtaacaatagctgaatcttggccaatcccagcagccgtacttcaaccactcaaacactgctgagtgttcacactatgttcaaataaggccaacaccgagccataaccaatccagctgtttctgtacctcgcctctgatttctgtacatcgctttactctttttgtttataaatgtgctctgactacgaggcaccctgggagtctttctgaatctgctgtgattctgggggctgccagattcgtagatcattcattgctcaattaaactcctttaaacttaattcagctgaagtatttctcttaacacactttatgtctaacctttccagtttcttgatgcaccttttaaaaattgaagaacaggctgggtgcagtggctcatgtctctagtcccagcactttgggaggccgaggtgggcggatcatgaggtcaaaagatcgagaccatcctggccaacatgatgaaaccccatgtagtagggtctttagtagagatgtctctactaaaaatacaaaaattagctgggcatggtgtcatgtgcctgtagtcccagctactcaggaggctgaggcaggagaatcgcttgaacccaggaggcagaggttgcagtgagccaagatcgtgtcactgcactccagcctggtgacagagtgagtcgactctgtctcaaaaataaattaaataaataaataaataaataagttgaagaacagatgtagggagctaacacttcactggggtgtacgtgaaaatcccagagaggccagagcgagagctcaagggattgaggagggaaggaaggaaactcatggaaggggatgagttactgatctggtcccagcttctctaggatggccaactggttgctgctggggaggctgtttggccacgctgtttgtcagaatgctccgcaggagggggagtgggaaggatgcatccagtggaaacccccatctgtctcctctcatcaaaattctcttctcagggggaattttcattaactctccacagctctgggtccccctccctacccaggaagcccgaggggttaggctctttctcaggataccccttctctgggcagcctggctcctttctctctgttttttaaaaaaaattcattttctggccaggtgccctggctcatgcctataatcccagcactttgggaggccgaggcgggaggattgcttgggcccaggagttcaagagcagcctgggcaacacagtgagaccccatctctacaaaaaatttaaaaaaattttttttctttcaggatgggccctgtagagtgcatttctcacagggagcacgtgttttgggtgctgtctttccatagggcccttctgactggcgggtgaacctctgtgactttctgcttctgagtggtcttggtgggacttcccccacttgggaaggctgttcctttctttcatgtaaccgaagctgggatcttggggtagaaagagtcaagggccatgcaagcagccctggcaaggccaggctgcgggaggggtgacatctgctgtgtttcccccattgcttacacctcaaacccgtggttcctgtgttctggtcagttctgcctctggctggcctcacagaccctgcatgtctagagcatgcccttgggctcgttcctgggagaagaatggccacatcaggacagacacctgcctgtctactaagaaacacgtccccatggccctgagtcccccttgcctcacctgtgtcatatcctgcatttctggccctgcctccttcttagctcagctctgcaaagaaccttagagaacatttggaacagtggttctcaaactttagcaagcttcagatttctctggaggactcgttacagatggctgggtcacatccccaggcgctcgaagtgcctgatctagttgcctgtgatgaggcctgggaatttgcatttctaacaagttcccgggtgctgctggctcaaggaccccacttggagaaccagagcgctaagggtcctcggtggcccagcaggacccctgcagatgcctaaggcagatcagtgctcagtggctaggagcgcagactggagctggcctccctgggctcaaattctgaccaggggcaagtgactgaaactctccactcagtgtctccatctgcagtagggatagtgacaaggttctgggggtgaagagaaagagagtgtctggaaagcactgagagcagtcccagctcattatttgggccgcatcaatgcagcctattgtcattcttgttttgctcacagggaaagagaaatttagggggtgaaaattaggcccaagctggccagaagcccatcggagcctagactccttgtcttctcactccggtggcattacctttccactctccaggccacctccttttggtgtcttggtcacgtagctgctttcatcagcccctgaggaaatgtggggtccatccagaagaacatggaagatgtctgtagatgccaccccaggcttcacccagtgctttcactgggaagaaagaacacagggtgggagtttgtcgccagctcttgcatttcccacccgcatctctcagggcctttctttccttgtgtgaggataacagtggtgcctacctctgaggtttctggaaggattacatttgacgaaatatgatcaagcccctagcaaagtgtaaggcacagagtccgccctctgtagagcctcgttgtcaccacggctgacacgggtgtcctctggtctcctaggatcaggccaggtttccttatctccgcaagaagtcttctggtgcatgggcccagctgtcaaaacagatggttttgctgtttccttcattcatgcaaactattaaaaataaatccaggagtgactgcatggaggcgtggcagctctgcggttctgccaggggctgggtgtccccagctgtccccgcctcatgacatctcctccccgccccctctgttaccctttgatccccgtctacacagcacaactcacattttctctattattttataccattcccgttagttttaatcctgtggtcctagatttgtatttacatttttttctgattattggacaccattttgtccaaagccctgccctctggctttcatgagtaacagtgaaaccagatcgaaaaacttgagaaaattgaaaaattctttcctttgaaccacacttttagggaaaaaaggcaaagcataagaataaaaaaaagctaataaaaattaagagacattgttaatttatttgaagacctttgagggcctgtcttcacaccacctccacctcactatcaccaggaactgtgactgatgtcattgaaacatggccaggactttgtatgcaggtgtatttaggtttgtggggtccaaaacatatgattctgggggcccactttaataataggaaattatgaatatgaagttaggtataaaagtgactatctatttagaagagacaccaatcaccatcaattataaatttaataacacacacataaaaggatccagaaaagtaacctagtattttatttatattaactaactatattttttttggggggtgggggatacctattctttgctctcctcttcatttgatgaaatttttaaaattttctaaaaaagagaatggattggtaatctggtctttcccctggcatctggaatcaatatttatttattatcaacaggtgagacattatttatttatttattttagcctcacagctcattattggtaatgatgtcatgcaaagttttagaattgttgttaaaattgggaagacctctatcaagtttctttcacacatgggctttaagtgttcaaggcatttcatgttttcttgactatgcttaagtagtctttgaaccaacatttcctcattatccagatggtcaagattgcctatattatgagtttttcattatcagtgtcagtattcagtgccacaaaagcaaaaaattggaatcttatttcactgtgttcctatgattcacttttttttttttttttttcagacagggtcttgtgctgttgcccaggctgcagtacagtggtatgaacatggctcactgtggcttcaactacccaggctcaagcaatcctcccacctcagcctcccatgtagctgggactacaggtgcgcaccaccacacccagctacttttttgattttttttgtagagacaggggtctcactatgttgcccaggctggtctcaaactcctgggctcagcaatcctcctgccttggcctcctaaagtgctgggattatgggagtgagccactgcacctagcccacttcttattattaattggatatcaaatcattcaagaaactatttattatttctattagaaatttatcttcctattaatgatttactgcttttggtgtaaacttttttgttattgaagttccttttttaatatagaaataatttctgttgtttcattattcatcattatagcttttaaaatattctatttttttcttttaaccctttaacaaattttaaattgtcaaaaagttactttttatgcatgtctacataaagagtctgtaatttctcccatgttttatcgaaacattccaaaacatcttttcaaatcacagttaaattaacatattcaagcttcgtcaacattttgagtaaattttttttggcattcctgttgtgtttgggtttctctctccctctgtcatgcaggctggagtgcagtggtgcaatcatactttactgcagctttgaaatcttgggctcaagtgattgcctttcctcagcctcctgagcaggtgagaccacaggcatgtaccactctacctggctatatatatatttttttttggtagagataggtgctgttatgttgcccaggctggtcttgaactcttggcttcaagtggtcttctaccttggcccccaaaaatgttgagatcataggcacccgtcaccacacctggccctctcttgaatctgtaataacatatactagaatcctcataatactattataaccatgtttcaaaggttggagaggtttataaggacatctctgtaattagacccatcaaagaaaaatccagttgatatgtgtgcttaaaatactccatcaatgaacctgaactgccccccctgccacatataactattgcagaatatcagggtagttaaaactttaggtcctgtgtaggcagatacttttcctatgagtcaaagaaatgagatgttcaatgcccatatattgtgatatttgtgtcaccaagctgggtgaattggaagagtgtgtaggaagagtattcctagaggtcatttctacactagactagctggtgataagttcatgtggaagtaattgtgaagcacatacatttatcctgttaaacccaaactaaacttaatcccacccctgagccagaacacaaaaatcacggcagccactccagttccaccagtcatgaggggaagtgtgatagagggaaactgaagtaggtggagacagtggtctaattcttgaatctgtgtattgatgtcattcatcagttttgggaaaaaatttcagctagcatcactgcaaatatttattctgacctattttgtctctcttcttctctgggacttcaattacatgtgtattagaccatttggtattaccttacatttctctcaccctctgctttttaaaaaatacttttttctttctatgcttcaatttagagaatttctactgagaatttcaagtttaccaaagctttattttgttcattctgctattaagcccgcccactgaattctctacgttggtattgtgttttttagttctacaatttccatttggttcttttttggggttttgatttctttgctaaaattctttatattttcacccattttgcccatatttccctctaaaaatgtcaccatatgtattaattagtttaaaatctttagttgctaatgccaactctgggtcatctgtgggcctgtttctactgactgctttttcttttgattatgggtcatacttcccagtttatatgcatggcttgtagtttttgttttttttttttttgagggagtctcactgtcaccaggctggagtaaagtggtgcaatctcagctcactgcaacctctgcctgccaggttcaagtgattctcctgcctcagcctcccgagtagctgggactataggcacagcccacaatgcccagctaatttttgtgtttttagtggagacagggtttcaccgtgatggccaggatggtcttgatctcttgaccttgtgatccccctgccttggccttccaaagtgctgagattacaggcgtgagccaccatgcccagctggcttgtagtttttttattgaatgctgcagtttatgtataccatagcagtggagactgaaagaaggtactaatttttctaggaagtgcttgcccttttgtgtgtcaggtatcttggattaggatctgatctcttcaatctaataattagttgagctgaattagagttgaggttgccactccagttgatttagttcacctctggtttcaaatatcttgagtgtgagatcaccctctctccaggaaggctatgaaatctaagcaccatgacaccacaacatttctctctgcttttctgtgtcatctcctgacttcttggacaccatttattcaataaatttctatgagagagagttggaagacggacagagatgtccaatgctgtatttgggattcctccaggttcaagtctaacactagctgtaaaatttccagttagtttctccttattcccccaaattttatttgcctgtagcagacttgattttctgtccatctacaaccccatgcttgacaacttaccacaggaatggaagggaccagttttctcacctgacatgggctcatccatctctggaatttagtttatttggatttcgaatctataggttttaaatagttttaaagaaaaagacaatttaatagcttaccagtgctttatccttgctctgctggagtggtggtcttttgtgattttttacatcctaaccagaagttgaaacacttaatatctttttaattttgtaaaatctccttttttttcatttttgcattttacatttcttttaaggcattatttgttttgtttattggctctgatgtcccttctaatttagtttttatttctgaaaaatttcctttatacttctaattctgttttgtgttctgtcatcttcatctgtctttcaaatcttatatttctaaatgtttctaattatgatttaaatgatactttaagatactttaatgacacctatcattttcctagttctttttacctcatttcaaatattaggttacattttcatcttcattgaatgtgtacctctctgttgtattttcattgtctgtagggccaatattattgttgttattaatatgttattattctgctttctcttatcataactttatattagatttggctatcatccattttattgctttttttaaagtgaaacaagtttttctttgttcataggatgaggcataggtcaagacaggttttcaaacttcatgggtctacattccctcttctgttgtttttccaaaatgatttcaaaaatactgcctgtgttttctgagatctgacattctgatccccattctgcattttcttctaagtcatttctcttatctgggcattttgtttgctagctttgaagacttatagactgcttcactgtggtcagaatagtattgtggtctcctttacccactcaggaactgaacccggtagagtcatctcccaacctgccactctcggattggagctctgtgctttcagtgaacacaggtcagcagtgttgttttttcctgtcctctggactgttggaatcccagttgacttccccaacttgccagttgtttccctttacacagatcctcataccacgtgggtcctgcagctgttggtggtttgtgccacacactcttactgtgagattctttgggattcctggtcattgattttgttgtagaagtacaaagtctttgattttgatatgctagttattcagtctgtttttataaggaaatttgaggagattaaattattaaaccctataatctccccagaatccttgtcataattatgttcaaaagactataaaagaaaaaaatagtttactaattatccacctctggtgccagtcaactgagatatttctggaaaggatggttctctctcagtttgatggctagacaaggtcatacacaccatctatggctgtttgcaaagaccccccaaaagcctgatctggttccttgacaccttgaattttctctgtcaagggctgaactgtgtcccccaaaagtcatctgttgaagtcctaacccccagtacctcagaatgtgactggatttggagataggacttttaaggaggtgactgaggttaaatgaggtcacaggaatgggttctaatttaaactgactggcatctttgtaaggagaggaggttaggacacaaacagacacaaaaggaagaccctgtgtagactcaggagaagacgccatctgcaagccaaggagaagggcttcagactgaaatgaaatgaaacccccactacagacaccttgatcttggacttccagcctccagaactgtgagaaaataaatgtctgggccgggtgcagtggctcatgcctgtaatcccagcacattgggaggctgaggtgggcagatcacaaggtcaagagatcaaggccatcctggctaacatggtgaaacccagtctctactaaaaatacaaaaattagctgggcatggtggcgggcacctgtagtcccagctactagggaggctgaggcaggagaatggcgtgaacccgggaggtggagcttgcagtgagctgagatcgtgccactgcactccagcctgggtgacagagcgagactccgagactccgtctcaaaaaaaaacaaaaaacaaaaacaaaaaacacattttgtggaaagaacaagaaagaataaggtagagtgatttttattttattttttctgttattttggcacaggcacgacaaagaccaggaagtgattggtcttttatctgttttcttatctgtttctattatggctgtacctgaaagtgtttaaattataccaaatattttcttgctctctctctctgtgtctctctgagttttactccaaaggttttctggagagggcacgcggtggaaaccagactttgttggcggaaagagatggttcaaaccttttgtctgctgcttgctcactggacgttgggcgaggcatcttacatgtttgagccactgcttcctcatttgtaactgggaaatgatgccctctcaacggatagacatgagcgttatatgagataaagctgtaatttgcttcctggcccataacagaccccaaataaatgctattttccatttcttctcttccttctcccaacccatagttagccagaaaaaaaccagttatgaaccaaagaaaattccagttcactgaatccctgtttacatttatgtaaattagaagcataaatgtaaattacatttatgtgcactgcactcccaaatcagtgtcctcagcaggagttcaaagaggtgctgctcccagactcaggaagtgcaccactaggccggtccatggacagtcttctgagcatgggcccctctcagaaacagaggctgtttcaagaattctatagacattgcatttattgggcaactggcaagctgatgtcccacctagtggtcagtgggaggtagcccatttcaagaagagatgagaagacctttcataatatcttctgctgggcagagcctgaagaactgtgtcagctcaccccattctctccatttacagaggcctgggcacgtacagcacaagcgtgaggcatgacaggtgcagcgtgcaacgtcctctggcaatgagggtggggctggtgagagtcactctcctggagagagagagaaagtcctgagattaagaggcatacctttgaatggtttccctaaaatataaaatatttcaaatacacagaaaagtttataacacacaacacattccccacccaactctcttgagtgctaacattttgtcacacttgctttctgttttattaagaagcaaaacaatacatatgccgtcaaatctcctaaaatacccttccacgaccctttctcttccctgtctttcacccagtggtaaccatcagctccaattttgtgtgtacctttaatggcattcaaaaattccactaacatcccatgtgtgaatccattttttacatgttttcaaaatttattttattgatgacatgctgtatgtattttttctattatgaataatgcaatgaactttcttgtgccattttccctatggaacttctgcaaaagtttctctattatttttttacatgtggaactgctggatcaaagagcaaatgttttctttccagaggtattgtaccaaattacccttcaaatctccagaggtaagaagacctcatgctctatatttgcacttatgttgagattgttagtcttcttaatattttccatttgatggttatgaaatgacatttcatactgttttgattcatagtttcttatttagtagctatattgaacatctttttatgtttcttggccttgtattttttttctcttctgaatggtctgttgatatcttttgccttttatttttagttttcagacagggtctcgttctgtcattcaggctggagtgcagtggcgggatcacagctcactgtaaactttgtctcccaggttcaagcaatcctgcctcctcagcctcctgagtagctgggactacaggtgcacgccaccatggctggctaatttttgtgttttttgtagagacagagttttgccatgttgcccaggctggtcccgaattcctgagctcaagtgatcctcccactgtgggcctcccaaagtgccaggcatgagccactgtgcctggccccttttattttttagttggacttttttccttactgattctcagggttgccttatatattcctaataggaatccccattttcggttatatgctttgcaaatatcttctcccatctgtatcttatcttttttataagtaaaaagtttaaaatagagttatatacattcataaaaatgcacaaatcataaatgtagagctcaatgaattgttacacccatgtaaccatccagatccaagaattggaatacaacttgccctacttcctgaccattctagcacctgccacactcccaagataagcaccgtgcagatttctgagtaactttgtgttgttttgaactttatatgatgaagtcgcacaccatatactctttggtttttgttttttttcacttgattataaagttgcaagattcgcttataatgttgcgtgcagcagtcattgtttatttcccatttctatttagtatttcaatgtatgtatctacctactttcatatgaatccatttgagtgttaaaaatgtttgggtaggatggacgtggtggcttatgcctgtaatcccagcactttggaaggccaaggcaggcagatcactagaggtcagaagttcgagaccagcctggccaatatggtgaaaccccatctctactaaaaatacaaaaattagctgggcatagtggcacatgcctgtactcccagcactttgggaggctgaggcaggagaatcgcttgaacccaggaatcggaggttgcagtgagccgagatggtgccatcacattccagtctgggcatcgcagcgagactctgtctcaacaacaaacaacagcagcagcaacaacaacaacaacaagtgtctgggtaatttccatgtttgaacaattatgaataaagctgctgtgaacattctggtacatgccttttggtgcgcacagagcgaaagtgcgaggtcatagggcccacgcgtccagcgtttgtaaagtctgcctgtaatgatgctgcgagtgctgaagacccttccattttcgacctgtcaggatgttagctgctgctgggagctgcctggccaaatgctatcctcttagcccagtgacagtcctgatttaatgactaggagatgtggggataaaacagcccagccccacaggttaatgctggacgtctctgaaggaccatcccagcttcagaacttcctgaaggatcacctgaagtctccatttcaaagttgaacagaagcagtcaggacaaatacaattttcccttcttaccagtgtaagggggaaagcaaccttgtatttctggaatcaactccattggtcatgatgtattttttatatttcccttgttattattggtagtattttaaaaaagatgtttggacctaactgcatgagggatattggactatcattttcttctcttatcttctcttgccataaaatgagtagggaagagtttcctcctactatatttctgaaagagattggtatttttatttctatttgatagactttactggtggaaccatctgggatgagtaatttctttgtgagaaaattttaaaattacaaaattcaatttctcactatatatatatatgtagatgcgatttctcctaggtttataatttgtgtctcacaaggaatttgttcatttcatctaaattgtcacatgtattggcataaagttgtttataatataactttattaattttttactatttgtaggtactatagtaatgagccctctttattcctgatattgataatctgtgtgttgtctcttcagtttttttttttcttaatcagtctatttagaagtttatcaatcaaccagcttttgatttcctgtaagttttcctattatttgtccacttccaatttcactgatttcagctctttactgtttccttcattcttttgattttgatattatattactcctcttttttcttctaatttctttaggttgatacttagataactgatgttagacttttcctgtttttcaataaagaatacatttctgactacatggcagcatcccacatattttgatattatattttcattcactcgcattgaaatatttctaatttcctttgtgatctcttctttgaccgatgaattacttagaaatgtactacttaatttccaaacatttgtggattttctagatatctcttttagtggcttgtattttaacttcattgtagttagggtacatacttggtatgatataaatcctttaaaatttattgaaactgtttctgacactggatatggtctatagtgaatgttccgtgtacactttttacaagatctctcttaaataaaatgcaaagctataaaatttctagaagaaaatttgcataaccttaggtctattgatgagattttacatatacaacactaaatgcatgatccatttaaaaagtttataagttatttacaagatctctcttaatttatataaatatacattgaaatcagtactgcctgcatcactgacttttattttttatttttatttgtaatttttttttttttttgaggctggagtcattggcacggtctctgctcactgcaacctctgcctcctgggttcaagtgattctcctgcctcagcctcctgagtagctgggactacaggcatgtgccaccacgcccggctaatttttgtatttttagtagagatgaggtttcaccatattggccaggctgttctcgaactcctgacctcgtgatcctcctgcctcagcctcccaaagtgctgggattagaggcgtgagtcaccgcacctggccgtattttttatttttaatttgttattatttgggtgaatttaaggggtacaagtgcaattttgttacatgattatattgagtagtggtgaagtctgggatgttagtgtatccgtcatcagaataatgtacattgtgcccattaaatcatttctcctcatccacctccctcccaccctccacccttcatagtcgccagtgtccagtaatccacagtctctgtccatgtgtacacatcctttagctcccattgataagtgagaacgtgtggtatttgtctctttctaaatctccacgggtttaacataacctaaagcatctgttggtaaactcagcgtttcaggtgtgaaaactctgaagtagaggcaccatccagcgagatgaagcagtcaactctgaccctaccctaatgtgtgacttaagagtcctgagcacctgagcaccttactctgaagatgactgtccccaagggcatgctgtgtcctagcccagtgtcagtaacagagctccttctgcctcatgccttaccctcttctccctctgctcaagaaccagttgtttggctgtgaaagtggcaccacgtagggaagggagtcacacacccagccctgaatcctgaaccggctgggcacaggtgtgctgtgagagtctcggagcctcccacagggatcatcttgcctgccttgcaggttgggtatggacgatacatcacttatgtgtggtgccagccacagagtgagcaatgaacacattcattcatttattccacaaatatttattaagcaactgctttacaccaacaacaccgtccaggcacttgggatagggtagtgattaaaatataaaaaggcctgcccacgtggggcttagactctaaaaagcagcaaagaaaatgtaaacaaataaacatatttcaggtcaggagttggctggggctgctggaacaaactgccacaggccgggtggtttgaacaactgaaatctcttactgatcttcctagaggccggaagtccaaggttgaggtgtccctggggttggttcctgctggggctgtgaggggaaatctgcccaggcctcacctcagctgtagatgaccgggctggtcctgcccaggtccagcctggaaggagaatatctccttggtctaagaaccatttgccttgtgtgggaagagattgataggtggaagtttcagcgggggagtaggtgggagtgactgatgtgaaggagaaaaactagccatgagggacagaagttggaatgctagctgtttgtctagccaccttatcagcataagcattgcctagagcaatgggatctgatgccttttgatgccccttgcagtgaatgactccagcttcctttggaagtaaagcggctttgagaagtgtttttattgaagagggattaatgatagaggatccttgtgtagtgaggaaacctcttgtatggtggtgcaggatatggatggcatatttagagtcagtataaatattgacgtgtagtccctttgcaagagtgaggacttgacttaaggcaatgagttcggcttgctgagaggtagtggatgggggcagagcgatagcctcaatgataggtgtggaagatactatagcatagcctgcctttgctggtgagtggcgattaggcctagtggaactgccatcaataaaccaagtgtgatcagggtgaggaacaggaaagaaggaaatatggggaaatggggtgaatgtcaggtggatcagagagatacagtcatggggatcaggtgtggtatcaggagtaatgtgggaggctggattgaaggccgggctaggaacaatggtaattgtgggagactcaacaaagagtgagtacagctgaaggagccggggagcagaaagtatatgtgtcaggtgtgaggaagaaaatagattttggaagttatgagaactgtagagagtgagttgagcatagtttgtgattttaagggcctctaaaagtattagggcagtggcggccgccgcacgcagacttgagggctaggcaaaatagtaaggtcaagttgtttggacagaaaggctacagggtgcggtcccagctcttgtgtaagaattctgaccacactaaccatgcctaggaaggaaaggagttgttgttttgtaggtgctggggtttgagagatcagtaggacatgatcagcagggagagcacgtgtgtttttatgagaattatgccgagataggtaacagatgaggatgaaatttgggcttgactgaagtaatgggggctatctgtgaaggcttgtggcagtacagcccaggtaatttgctgaacctgatgggtgttagggtcagtctaagtgaaagcaaagaaaggctaggatgaagggtgcaaagggatagtaatgaaagcatgtttgagatccagaacagaataatgggttgtggagggaggtattgaggataggagagtatatgggtttggcaccatggggtggataggcaaaacaacttggtcaataaggcgcagatcctgaactaacctgtaaggcttgtctggttctaggacaggtaaaatgggggaattgtaaggagagtttataggctttaaaaggccatgctgttgggaggccgaggcgggcggatcacaaggtcaggagatcgagaccatcccggctaaaacggtgaaaccccgtctctactaaaaatacaaaaaattagccgggcgtagtggcgggcgcctgtagtcccagctacttgggaggctgaggcaggagaatggcgtgaacccgggaggcggagcttgcagtgagccgagatcccgccactgcagtccagcctgggcgacagagcgagactccgtctcaaaaaaaaaaaaaaaaaaaaaaaaaaaaaggccatgctgtaacaggtgagtgataacaggctttaatccttttaaagcgtgctgtgggatgggatgttggcattgagcagggtaagggtgattaggttttaatgagatggtaaggggtgcatgatcggtcgccaaggagggagtagaggtatcctatacttgtgggttaaggtcgggggaaacaagaggaggacgcaaaggaggctttggattgggaagaagggtggcaatgagatgtggctacagtccaggaatagtcagggaagcagataatttagttagtgtctcggcctaataagggaactgggcaggtggggataattaaaaataagtgcttaaaacagtatcgtctaagttggcgccagagttggggagttttaagaggtttagaagcctggccgtcaatacccacaacagttatggaggcaagggaaacaggcctttgaaaaggaggtaatgtggagtgggtagtctccgtattgactaagaaggggatggactttccctccaccgtgagagttactcgaagctcggcatccgtgatggtctagggggcttctgaggcgattgggcagtgtcagtcttcagctgctaagccgagaagatctgggaaggagtcagtcagagagccttgggccagagttccaggggctctgggagtggctgtcaggtgagttgaacagtccgattttcagtggggtcccgcacagatgggatgcggcttaggaggaatcctgggctgcaggcattccttggcctggtggccagatttctggcacttgtagcatgctcccgggggaggaggttctggaggaacccctggcagctgcgcttcaggcgtttggaagttcttgtgtcctggagatgtggctggggtttgtctcacagtggaggcaaggaattgcaactcagaaatatgttgctacttggctgcttctactctattattgtacaccttgaaggtgaggttaattaagtcctgttgtggggtttgagggctggaatttaatttttggagctttatttaaagtcgggagcggattgggtaataaaatgtatattgagaataagacggccttttgacctttcagggtctagggctgtaaagcgtctcagggttgctgccgaacgagccatgaactgggctgggtttttcatatttgatgaaagagcctaaacgctaactgatttgggagaggtcggataaagaaaaaggagcattaaccttgactatgcctttagctccagccaccctttttaagaggaaattgctgggctggtgggggagggctagtcacggaacgaaactgtaagccagactggtgtgaggaggggaggtgataaaaggattataaggtggaagagcggaggctgaggaagaattgggacctagctcagcctggcgaggaggggaggggtcagatgggtctgtagaaaaggaagattagaaggactcagcgatgcttggggttgggactgaggggacaggcaggagggaaagaaggaagatttgggacgacttgcattgggaacagagactagagagggactgatgtgtaaaagaatgcctggatgtcaggcacctcagaccgtttgcctattttacaacaagaattatttacatcttgtagaatggaaaaattgaaagtgccgttttctggctatttggaaccattgtcaagtttgtattggggtcaggtggcattgcagaagaaaataaggcatttaggttttaggtcaggtgtgagttgaagaggttttaggtttttaagaacacaggctaagggagaagggggaatggagggtggaagcttgcccatagtgaaggaggtaagcccagagaaaagagagagtagagacatggagagaaggggtggggggttcttgacccccagaaaagcggagaaggggtggcgacacagagagaaggggttggggggttgttgcccccagaaaggcggtacttgccgctaagggtgaaggaccaaggcaggcgtcccgtggtaaaacacctctgaaacgtgggtgaataatcagggaggtgtccccgcgtgattaaacaccaagggaagacttcttgagtccgtgactggcgctggagttttgggtccacggataaaacgcgtctccttcgtctctaccagaaaaggaaaggaactgaaattaagggagagattaaagtgtggtgccaagattgaaaggagaaagaggttgagggacagtgagagaggttggagaagagagtaaaaacaaggccacttaccggagttaaaattggtgagatgttccttgggctggttagtctgaggaccagaggtcgtaggtggatctttctcatggagcaaagagcaggaggacaggggattgatctcccaagggaggcccccgttccgagtcacggcaccaaaatttcactcgcgtccttgtgaagagaccaccaaaccggctttgtgtgagcaacaaggctgtttatttcacgtgggtgtgggtgggctgagtccgaaaagagagtcagcgaagggagataggggtggggccatttcataagatttgggtaggtaaaggaaaattacaggcaaaggagggttgttctctggcgggccggagtgggggtcacagggtgctcagtaggggagcttttgagccaggatgagccaggagaaggaatttcacaagataatgtcatcagttaaggcaggaacaggccattttcacttcttttgtggtggaatgtcatcagttaaggcaggaaccggccatctggatgtgtatgtgcaggtcacaggggatatgatggcttagcttgggctcagaggcctgacatcctctcaacccccaactaattacatttgcaaagacgctattttaaaataaggtcacatcctgaggttctgggtagatgtgaaatttgggggatactattcaaccccttacaggcattcacactgggctcagcatgtggtagcaaggtagtcacccacagtggctggaagctccttcctttaggcctgagacaggaggccctgagagtcctggtcccgacctggtgagccctgctcccgccccagatgacccctcatgacccctaatctttggggacaagcctgctgacactgaccaggctggaggacatttgtttgctcccctcctccagcacccagggcagccctggagttttttctagctttccccgattcttttttcagccctattttattttctgcatctttttttcctatatctcaagtagcctgcaatcaaaccaaagccacggtctgaatgttgtggttattgagagggtaaagttttttatttttatttttagagatggcatctctcactgttacccaggctggagtgcagtggtgtgatcctttggactcagttgatcctcccgcttcagcctcttgagtagctgagtctacaggcatgcaccactgtggagtccaaattagtaagcaacaatgagaaaggggccccctgtggggacagccattgttctgagagaccggtaatcacagacaacccactagcacaacatcctgttcccaaatacctcgcgccacacagcgccagcagcacaacctcattctgcacatagccccctccagtgtgaacctataaaacttccctccagcccctgcctctctgcacacagccctttctctgctgtgctgtccattaaacccttgcaacatttctctgtaccttacctaataaattggcctttctttacttacaactgtcttggtaaaatcttctaccacctgtgatgctggccccagccagtcgcacccacgacagccaccatgtccggctttttaaaaaaatttttgtagagatggggtcttgccatgttgcccaggctggtcttgaactcctggcttcaaatgatcctcctgcctcagccatctaatatgctgggattacaagcgcaagccaccgtgcctaggctgcaaacgtttttctaaacgttaaagcaatcatttgtttaaaactatttttaatttgaaaagagagagaaagtacaataggtaaatgcgtgaaattggtggtgggctgcaaaaatgctcatactgagttctttctgtctgtcccctctcgacttggttatcaattcctgcacccccttgggctctgtcaggattgcatcctgcctgctttgtacacatggaacagacttctgggttcttggcagccctaagggatcaggctctagtgagtgatcacagccagcgctgccttcctttcaggccctggtgcttctctgtttatgtgccttacggcttctgcagcgctgcgatgcctggaggaagaatttcccacttagaggcttactgctctgtgcacagacacgcgagttgcagaatgagtgtctaatttggcgtggcccatgaagggtgaaggctcagccccacgtcttggtttaccttcagctgctggcaatggaggtgagggggagggtggggccgtgggtttccacttaatttgtttctcctggatctttggccctggcagcctcccttcagcatttcgaggtacggataaacccccggagaaggtttgttcagattccatttgacaccagttatctcggtcaccctgtgtctgagtgccggctaagtagctgtccgcctgcatttcccactgcagtcttctcacttccaggacttgttagggtgcattagccagagctaattagcagtgagattgttgctgtggctcagagggtttcatagggcggctcttcgtggcttcagcatgggtgcacaccaagggatgacgtgaatagcgatcctgacagttgtgttttcatcagggagctgctgtgaccctctcgttggaatgccgtgaatatgatgtggttctgtcttccttgttgctactttttggcggggaagtgatgtgtgaattcggagaaggaagcagaggagggccgggtgggcgttgccctgggcaggtgctgtagagggaggggacagtgtggaaactgggctgagggagttaacccctctcaccaggccccttcccagcccagcgtccgcagaagtggaagggaaatggcagtgaggcctcatgtggcaggtggttttccaaagctaactacaaagctgttgccacgcctatggtcttctgtgaacttgccaccctgtgatggtggagcctctgcgtggtggaatcctggaatccgactgcatggagcatcggaatatggtgaaaaatcactccgttcctcgtgtggataggtaaaccaaaaataaaattctaaccccgccccccgccctccccatctgaaggtacccctccccttggcaagggtattggaaggctaacctgagggactggttcaggccacgatgtggggcgggggctggacatgcctcactatcccctcctccctttcagaatgactgatagaacaggctctttcagtctaatgagaaacatttacaatctcttctctctgaagcctgctacctggtagcttcagctgcataataaaactttggtttccacaaccccttaacataacccagacactcctttctattgatgccaggtctttagatagtaacttaactccttcaaccgattgccaatcagaaaaaatttaaatctaactataacctggaagtcccctccccgcttccagttgtcccgcctttctggacaaaaccaatgtttatccaacatgaacttgatgtctagtgtctccctaaagtgtgtaaaactaggctgtgccctgactaccttgggcacatgttctcagggtctcctggggctgtgttatgggcagagtttggctcttttcactgacagacattaacattaactgaggtgctttggcttctagccccttggaagctgccgtcctgtaaggaggggcacctggagacttcccgactgggaagagctcacatcttgtggagtttgggggctgcggagacagagcaagacaaggaggctgaggcacccgctgatggtgcttgggtcagagacacatcctctgtgcctgtcctcccaatccctgacctgtaaaataatgagaaaataaaggatgatttgaagccttgaagtgtggggaggctgcctatggagcaaccacatcaccggagcatccagccaagacaaggctgggatgcggatgaggttgtaagatgagctgcccaatagcctggtggatggggatttcagcggctctcccaggcaaagagaggggcatctggcagggcccagtgaggactctggcttcctgtgcagcctggtggaggcccccatctcactgcctctgggtgtgagaggggactgagcaagagcaactcactgtccgcttgctgggaagctcaacgttcatctccccacttagcaaatgcatcccgattacgtgtccacaggcctgctgagacaggaggagcaaacaggtgacctgggccctcagcaactgacggtgtagtggcacgtcccaagaaatccctgcacatccctgggaggggcaggcgggtttccatgggtcactcagagtggggagtgcaacccagatggtggctgctccaccaagagcctcccttagctggtacctctctggatgctcctctggggagtcttagcgatggaagcaatatggccatcaaggtatcatagctgggtcatgacatgagcacctcctgaatccaggtggataaatacaggtgagatttgcttaggggctttgaggcaccacttgttgagacccctctccctcgaggaacagggagtcatgtttagggactaagccctgatctttttcccttcgtctttgttatccttggcagtagccctgagccctcctgtaaaaagtaaagtagaggttcctcttcaaagattttctccccatttaattaggaataaatagtaacttctcttaaaagcaaaatttattcaaagacctgcactaacattcttaaatatctgctagccgtaataaagaaatcaatatactttatgttcttagctcccacaatttagcctaaatatttgccctggcatgcttatactggtccaagcaagcattaggtcatagcctgttcctcttccttatttgaaggtggttttacctttctcagcattccgcaaagttacttcctccttcctctgttctcctctgcctttgcctgttttaaaaagttctaagttgctagccaatcgagacaaatacagaatgtgaggttcccttccagccagtggaaaccggacacagcagtagggtggacgcgtcaggttataaatgatcccgtctcctttgtttggtgtattgtcgtggcaaaactgctggcgagtgtaccctttctgcagaaagtataaaaatggccttgctaaaaaaattaaatttatgttcaagtgctatttctttctttctttcttttttttttttgagacagagtcttgctctgtcgactaggctggagtgcagcggtgcgatcccggctcactgcaacctccgccttctgagttcaagcaattctctgcctcagcctcccaagtagctgggactacaggcacatgccgccacgcccggctaatttttttgtatttttagtagagacggggtttcaccgtgttagccaggatggtctggatctcctgacctcgtgatccgcccacctcggccttccagagtgctgggattataggcgtgagccaccacgcccggctcaagtgctatttctttacggcaccgggaaacaagcattttaaacacctcctgactcactgaagccagtttttgttactgggcaagaaggaatggctgaagatcccccacaacgtggtgcctcctctgcccagcagcctgtgccttatggtgtgagacgcagccccaaggacttttcctcaggaggaggctcatcttatcctggggcttgtgggttttgtcctgggctcaggagggcactgcacgtttataaaataaaacctcagatttctttaataatagggaattaaaagggagtggataaacttaatgtaaagacaattcacaaatgttttaatcaatagttgtattactccaccctcacgctgcaaataaagacgtacctgagactgggtaatttattttaaaaaaagaggtttaatgggctcacagttccacgtggctggggaggcctcgcaatcatggcggaaggtgaaggaggagcaaagttatatcttacatagcaggcaagagagcatgtggaggggagcttccctttataaaaccatcagatctcatgagacgtattcactatcgtgagaatgataagggaaaaactacccccataattcaattacctcccactgggtccctcccacgacacgtggggattatgggagttaagattcaagatgagatttgggtggggacacagccaaaccatatcaatagtttaatcaaagctacttatggggagctaatttgaaacttccttctgtttctttcttgttctggacgtgtgcgttacgatgttatcaccaactctccagcagcagtgggatgagctgggaagttcatcatcatttctatgactgattgagatttgattctgtctgatttcatgcctgcatgggcacatttttcaaacagtgtgtggtcggcccgttcctcgtattcattcatggcttctgtgtgaggaacctgtggtcagtgttaaggggacagtgtgaccagcagggatgataaagctgtgggcatcttagtgaggttcttggggtagctcctcaccccttgatcaccccaagggccacgtggcttgcccctgaacctcccttcgcgtccagcttcctgggctggtcaaacactgattccaaaggaacactcacacgttggtctgcttgagggctgcagaatcgtgtgtggaagtttggcagctccttggcaagcctgctccttccccagcaaatggaaacaccattctgaacacctgggcattgtctctgatgtcccttttcatctccctactctcacacaatccagctgcctctctgccttccacggatattaagaacgtccaccatctcctgagtccaagcccttctcactcacctctttcttgaactaatttctttctgtttttttccagtcctcccttctgttcatgtctctcctctgcacacttccattttctggttcagaaaatgtcaccgtcccagtcacacttgccttatggctgttgtgtcataaatacagttgacacttgaacaacatgggtttgaactgcatggattcacttatacacatattttttcaatacaaatatatttaaaaattttggagatttgcaacaatttgaaaaaacttgcagatgaacagcatagcatagaaatattgaaaaattaagaaaaaggtatgtcatgaatgcataaaacatatgcagatactagtctattttaacctttactgccataaaatatacacaaatctattataaaaggttaaagtttatcaaagcttatgcacacaaacacttatagaccatatagggagccattcagtagagagaaatgtaagcgaacgtaaaggtgtgctatttaatcacaactgcatacacactgtaccactgcactaatttcagagccacctcctgttgtgattgtggtgagcccaagtgttgtgaggatctgcttaaaatgccatgtgatgctcatcctgtctgtgtgagcagttcatttctccaggagatcgtgcatcgcaggaaaaagtgatctctcgagtgtcctgtgtattttatgtcgtgtctggtgcaatattgtaaacattgaataacatcatgggacccatgcgaagttccactagtggtgctggaagtgctcccaagaagcagacaaaagtcatgacatgccaaggaaaagttgacttgctacagaactcggattgaggcctgccgctgtggttgctgccatttcagacagatgatccagcttgtaaacagatgacataaacttatggtattgataatagggcatagcactgtccatgtactttctcttccttatgattttcttaacaatgttttctttttttctagtttactttactgtaagaatacagtctgtaatgcatatatgaaatgtgtgttaaccgtttatgttatgggcttccagtcaattatactactaataacttccaggctattagtcaaatttttagggagtcaaaacttatatgtgaatttttgactgtgtaggggtcctgcgttcttcaagggtcaactgtgcaccgcactgggtggcttaaacaacagaaacgtattctctcatggttctggaggccagaagtctgaaatcagtactactgggctgaaatcaaagtgttaactgagcccctctccctctggaggcatcggggggaattcccttccttgtttcttccagttctggtggcctgtggccttcctgggttgcggccacatcactctgatctctgcctccttctcctctgtgtgtgttctggatctgcctctctcttataagctacatgtgatggcacttagggcccacctggataacacaggataagctccttctctcaagaatctctaccttatcacttcttttgccatataagataacagtcacaggttctgaagattaggaagtgaatctacatgcaggggccccttgttttgcctgccaccaccaccctacttcaagatggcaccctttcccctccagcttcctttctctgctttatttcctctcataacattgggaataaggaaacagaaagctccagggtttcttagcagtcagtccctggagttggtgaattttaggcactaaaatgcccaagaactgtaatgcaccaagaactgatggcctctgtattggtcggggtaaagaagccactcaatggatttcaggtctgaagggcttagttagggagttaggggcttgcctatctcctgggagagctggaggagagaaggtcaggacttgtctctcctgaggcactgaaatatctgggtttcagaaaactggagtgactcccagggtctctgggcagtttgcaacaactttctccaactgcagcagcaaagtaggcgatgtcgaagagtttaccagatggccgtggagtctcatgtgtctgcttgcagctgttttgggacaagaggggcttctccttctctcctctttctaggcttcacacaagttcctctcatggacagactcacccagaaccagacagggatggagagttggtaaaggtaattcctggcttccttgagatgcaaaggggagtgtagaaggtagtggcactggtgatgcaggctgacctcccatctccagccccacaaacagtggggaatcattcgcatgtcctcacaacacaagtgtcaccgtgtttatttctcaatacttctgcttatctttaaaatgcactcatccattcgttggctagaatagattgaatgcttactctggacaaggcatggcttccactgaaatgcatgtctggctcatatatttgctctggggaattcttccctagatctcctttcccttactctctgctcttccctcactttcttctcttttctcccattctttcattttctttccctttttcttttctcctgattcaatggtgaacttttgtgaagtcccgtttaagtcttcattcactcaattcataaacatgccttccctttttttctgtatcattcaaggattttggatgcaaataagaaagcttgaactctggttgggaagtaaactctacattttgaactgcatatactcattgtcatgtcctctgttggaagtgctattcccttgggtaccaagatctctaaacaagcagaccctataggttgtaggataagatgcaaacattttgcaaatgggtcttagatgtagtcctgagatgccccatctccacttcctctccttcttcccattcccatgtcttcccgtaatgggagaaatagtctcatatcacacaggtcactggctcagcatgcacactgtatcctgtgagatggccctcaatcttgcagggtgtagcctcccagttgatggtgtaactgagtcttcagtaggcctcttcatgagcctagctgattgtgaataatgggtacatggtcaggcttgtgaattccataggcacctggtcattgccttagttcttctgctggtgtgataccaataatgtgataaagtgaatccttgttcagaagcagtgtcatgtctgatactgcgacagtaagaaaggtgaccagtagggccatgtgcgatggtgttggtataagtgagggtgttggaaaaagcaagccgaaatcagagtaagagtctcttccagtgagaatgtattgctggggtgatggagtcccagtgaaacaactggttgccaggtagctgccatattggtctagaattgagtgttcacacgtggttactgcattggaaaattaagtactcagtggtgtagcagctgagtcagccttggagaaggagctgtctgtatttttgagctcatgaataggatccatcctgaaaccatggtccctttgttgctgggttcccaagcaagcacaatgatggttggggaggttggtgattgacagtcataggtagcagggccttaatacaaatgatcgggacccttctccgcagtaaagacttattggtgagcatttgcgtggaccacaggtattcgcacacccagcgctcattcctaagggtcttctttctgaatttattgacgccaatcatccaactgtgcttcttccaagaccctggctgcccagtcaaaccaatagtcactgcctatgttctggtctagctatttcttcccctaggcaaagtagacaatgagagaacccttgaagttatgtctactaaaaatatttaccttctccaccatctttcagaatcatctctggtttgttttgggaaatgtttaacaacaggctctctggaaaaatagaagctgtaatttgtagtatttgccaatttctgtggtataaatattcccacagtcaccagtctcaagctactggcttgacgtcactgactgcagagttgggaagagaggtgccattgtcttccattagatagcatttccaccaggcatatacaatagatgtcagtgacctcaagaacagagataatagtgaaatacataaagcgatgaagaagagatgaattttgagtattttttttaaatctttgttttaaaacataatttatttaattgtaagtttatataattttgtttttaatagtggttgtgtttaacaaccagcctgcaaaattcctggaagaatttcggttggctcttgtgaactggtcccagccggctccagctcaacactggctgtaatgctgcagtgttcgtcccactgctggctggggcatacgtggttggcagtgctaccagtaaattgggccccttttttttctcgccaggtaactggtcatagagaacttcccatgaggccttaagagtggattaaggaatgggtagcagtgaaatgagactaagcatgccaggagtttgcaacccctacctccacttatgcaactttctatggtcttcagacctgctcaatccctggcctgtacatgccatcccccccagctgatgcaatgctgctggggtgcccacttgatggccagctgggagagacccagcaggacctagtattagtggagtgaccctgctaggaggtcactcacccccagtcagctgtttcctccatcattagccagtgttgtgcccctgccagccttggcaggggttgattaacgttcttataccccctctggctctagcctactgactctgtcaccgtgtagctaatgatggggtaaatgctggtgttcatttcttcctttcaatacaaaaggacccagacattagatcatctcacagtgttcactatgtaaccagcagtataactttccattcattgttataattgtgtgatactaattgtcatttgtgatgtaatttcggactaaatatttaaatctctgagcctctgtttcctcagctagaaaatagctactgatactactgatcttgcaggactataaggattaaataagataatgtataaagaatgccctgcacctatacataaaagtgccaatgagtggtggtgtttgtagttggggtggttgtgctgtgatacagtccacaaagggaaggagtcatctgttcaccttgagtctataaaagtgaaaaaacaatggtttttgagactggcttgacaagaaagaagttggaaatgagacctgaaatgtattgaccatagcctctggcaaggctactctgtcctcactttaccccgctgtactagtgaaaagcaatggtttggggagccacatttcccattttcttgtctttgggatttccttgatgctggagcacagggaggcagagactgatctgctccaagcctccttgggggatggaaggtggcccacatgtcttctctctggagatgatttcaggattttgagagaaaataaacatggagctgtgatttaggaaaactgtaaatcaagcagctgttgggaagacccaaagtgacatatttatttataagggaagaaagatcatattatatgagcaaacatataaaaggatgtgtgtattcgtgctggctaaggacagctgccataaaatatacacatatattttatgtgggagacacgtgctgttccgagttcctccactgtgctctttgagtcccattgggtgtaacatctgtccatcctgaggggccctgcctaggtggtgaatgtggaagcgcttgcctttctggggtacatactgaccttaggtggttaaatgtatcctactggttataagtacctgggtcacagccacaagcaataattggataaaaggactcctttagttaatgtatactaattaatttcacagaaatcacctgtaagagctgatgtaagtagtgcgttgtgttttgtcaaaatatgagataatttggtagattaaacatttctactatagatggaaagcacccaataattcccagctggcaaagaatgaaatttcaaagaatgaaattttcacaatataatgcaactgtgaaagcaataataaaggtttcagtggctgctgtagtcacctgaatggcgaactctgaatattccatccaacccctcccactcagccacccatccagtcacccatctactcatctatccatccatccatccctccacccacccgcccaaccatccatctacccatccacccatccattgacccatccactcatccacccatctacccatccacccatctacccatccacccatctacccatccacacatctagccatccacacatctagccatccaccttcccacccatccacccatctatccatccacttatccacccatttacccattcacccatccacccatccatccatgtacccatccatccacccatctacccatctacccatccaacaatccacccatctacccatccaacaatccatccatctacccatccacccatcaacctatccacccatctgtccatccacttatttacccatctacccatgcacccatccacacatccatccatccacacatctacccatccacccatccacacacccacctatccacacatctacccatccatccacccatatacccatctacccattcaaccatccacccttctacccatccacccatctacccttccacctatccacccatccactcatctacccttctacccatccactcatctacccttctacccatccacttacccattcatccactcatccacccatccacctttctgcccatccacctatgcattcatccacccatccatatatccatccacccatctacctatccacccatccacccatccacccatccacccatccacccatacacccatctacccatccacctatccatccacccctccactcagccaccccttcatccatccatccatccatccatctatccaataaataagtactgaacaccaactaagctccaagcattacaaaaggtgctgagaacaaagatgagtgagaccacctttggctgacagagagcttgtcatgtactggggaagacagacaagaggagtgaacacacagggcagcgttagtttacagatctttgaagacccatacttggaagcctactggctccccaggggagttagggaaggatgtctgagttccctggatggctctgaattcacattccagaaagaaaggaacaatattgtcaaagccgaagtggcctaagagggtgtgccctgtctagggaaagtagacatttgataaggtaggctaaaaggggagagttttggtctgcagaggggcccagggcccagaacctgctggtgctgagaggctcagctgaggcgtttggactgaatgctgcatagcagtgagcattaacctgtgctccggtggcaagagtcttggggcagttgggtttgaggggtagggctcttagcctccacccatgctgcaaccaagctctccactttgtctgcgttaaatatcgagcttctgcttgagctttccttcagagcatagtttctttaatttgaaaactaccggaatagatgaagaagtgtcagtatggttttgaccagggagtcgctttagccaatcccttgggggtaatgcagagggttgcctcagtggccagagaaaagcagagatggggctcttccctggatgcatctccacagggttgcgtggggcttgatgggtgccaagtgcgacagacacacaggggctgggggacacagaggacagggtaataattccaccaggcacaacagtaatattggcaggggcacattaggaaaatcaggacgaaatacacacgatgtcccagggtttgtttcaccaaacactagcttctgggaaagaatttatcttaggcacatttttacatgacttttgttcatgttacagtatgaggcaactcacgtgtcattttaaaccttggcttcctgcacgcctcggtagagagggacagctggctaagccaccagcccgagattccctggtggggaggagttagagccgagccgaggcactggagtttggcaaagccaacccatgcaaaatggaccactgagaacacgaaaaactctcacggaatgtttctttagtccaacatggaactttatcatgaatgatcaaactccttttattaagactcttagagctgtgacaaggggcaggatcaactgctctgcaagtccctaattccctttcgtttttttcaagttccatgaagtgcaaggtacaaacaggtatcaaaggagtcccacttgggtcagtaggtgtggaaaggagcggagctgacccattgctgggatctggccataggcagaacattgtgggagagatggggaaagagacaggagggggagagcgagaaggaggaaagggagcaagagagttagggagagaaagaaagagatggagagagaggaagagtgggagggaagaagagagaagatcactccaaacccatggtactatccttgggttatgcctgatatgcctgacatcttgagtggccctggggcagggtgttgcgctttgaaacaattcatgctctcacttgtagaaaaggccgacttctttggacacagacacacataaaaaagaaaccaaggccatatcaaatttttcttttattgttccagtcaaaaaaagaggaacacctcaatatgtaaacagtttccctaacacagcgagttcttaaagatatatatatatatatatattttttttttattttaaaaaaatttggcattgtagtgatttctcaatacataatttgtgctttcgcattgagcatgctttcgtctcattgtccgtgcacagacatacttggagttgagtaaagggagttacaaaaggaccaaaaaatgggacaggagccaaaccagtacttgagccctacctggtgttccttcctaaaaagcatggtggaaaagttggcaagattgacctcagaagcaaatcttagtgactttattccaaagaaatcttagaagccttggtagcaacttttgaaagaagcatttcttgttttctttctgttcatccctaaaggatcattggttttgcttggagaaaactttagttattttgtatgttatatttcttaatatccctaagtcccttctaaaataaactcttgttttgtgattttgctggacacatgatggtttacaactacatgctattgaaattccactagtgatttattctgctttttgctgaatcatttcaaagtgcttgacagttgtgtaaagaccttttggttttgtccagtgaaaattattttttaattcaatactaaagacttcagagcctttaagatgcaatgatgggtttatcaataatactgttcatgctattcgtttcttagtccttgtccttagcctgaaattctaagtctctataaattagcaccagttttccaaatgcatattttatcaaatcctatgatcctaggctggtctaggtaccatcccccaatcttaccttgtgtgtttctgttttaagaccctctcccatgctggccttgcaaactgaaatgcctttgcttttggatctctctctctctttttaaaatagagatggggtcttgctgtgttgcacaggctaatcttgaattcctgggctcaagcaatcctcccaccttggcctctcaaagtgctggaattacaggcatgaaccattgtgcttgcctgcccttggatctctgtctccaaaacctaagcagtctttgagaaatgtcagggcaaatgtccctttcttcctcatgaggccatttcttactgcttacgcagaaactgatctactttctttacattccagcaaatttgttgtgcctgtccctcttcgtttaggtatttctaaaactagactcagttacttcacgtgtgaagtgggaagcagtattttctcacagggttttgtgtggttcgatgcacttagcgcagtgttgttgcatggtaagggctggcagccatgggattacaggcttgttgaggacagtgggggatgttactttttctcagagtcttcatagtaacttgtcaaggacatcactcactgtactgcaagtgttcactgagtgctcatggccagcactcaggcaagtgaatacacatttggagtaataaaatatggggcatcagctaactttcagaatattttgagtggagttttgtccttgtctagttttagttgcctgttgggatccctgagtataaaaatacaagtgtgtgcctgctcccagcattgacgagcttcatgaaccttgaaaatggaacactttatttctctgtaggatgtgagcatttgataaagaactcaagttcctgaaaaaatttctggagacaaagttgaggatcaagtatcatctgtgcttcatttcttttgggaagatgtgcgttctctaggtgtggatattggagttggcacactgacatgcaccctaatgaccctcagcttggggacccaattctgacacctgctgggctttgctttctttgcttaactagttcttgaaaattctgtgtgatggtgagaataagaagttccaggtacatagaaacatgaatgtccacaaacatgcaacccccaaactagatgcagtcttatcttcaatcgcatagattcaaaattaaagagactattgaaaccttggcactgctagagacttttgaactaatagctttctggaataattttctatcctaagaaatagctcacagaacaaccctatattttactgggccatagtaaacattttgggccttaatataatgccattttattaggaaagacaaatacaatgaattatcttatgattaataatgaaaagtggccactattttccattactggtatataactaaaataaagcagtagtgctacggttaaaataaatcagcttaattaaaatattatggtttaagctttttgcctccttaattatcctgtctggtttagtttttgttttgtttttctgactggggccctaggtgcatgctttagggagggtagagctggatttgggttaaaagcaaattgtcagtagcctgctggagctgaaggaattgctcatggatgagctggcgagatgcagcctcacatttattttctatcaatgatgctgaccttccttggacatttttctactgcagagaagaccacagtgcatgtccagtagcacctcatttatctagaaggcacctacctcacagctcatctctctgctaccgggtttagtggtggtaatgacaggggagcaggacgtggtcggtgggtgctgttggagacaagtgtgtggctggtagttaatttccctgctgccagcaagggaatcagttaaatgatgaaaacagctgagacttaaagctgaaccatctggggtcatttagtgtagaggtacagtctagaactgatggtggtgtaggttggaatggatactagaattattaaagcagagactatggggttcaaatgtttgttgaaaaagatgaggaaactacagcagattagtctttttgcttaagcttgcatggaatgttcatcaagttagactgcattctgggtcataaaacataccttaacacatttaaaagaatagaaattctcagatcacttgggatcaggagttcaagaccagcctggccaacatgctgaaaccccatctctattaaaaatacaaaaattagccaggtttggtggtgggcacctgtagtcccaactacttgggaggctgaggcaggagaatcgcttgaaccccggaggcagaggttgcagtgagccaagatcatgccactctactccagcctgggcaacagagtgagactctgtcttaaaaaaaaaaaaaaaaaaaaaaggaatacaagtcctacaatgtttgctcttagataacaatggaattaagctagaaatcagtaacagaaaggtagctggaaaatgccaaaatacttggagattaaacaacacacgtgtaaatatcatgggtcaaagaagaaatctcaagataagtgaaaaaatattttgaaataaatgaaaataaaaacatagcttattataatttgtgggatgcaataaaaacaatgcttaaagggaaatttataacattgaatgcagatagcacaaaagaagatctgaaatcaatcatttaagtttccattttaaaaaagtagaaaaaaagagcaaattaaacccaaagtaagccaatgagaagaaataattaaaattagattaaaaattcacgaaattgaaaataggaaatcaataaaataaatagaaacaaagttgattctttgaaaagatcaataagctccataagtctcaaggcatgctaactaagaaaaaaagagaaagaacacaaattactactatcagaaatgagagcggggacgttactagcaatcccatggaggttaaaaggataataaaagataatgaaggaattttatgaatgactttatacccacaaatttgataatgtagatgaaatgaaccaattccttgaaaaatagaatttgtcaaaactcacacaagagcaaatagacaatctgaataggtatatctctgttaaataatttgaatcaatggttagtaacctccccaaccagaaagcacttggcccagatgggttcactggtgaattctaccaaagacttaaggaagaaatgatactgattatctacaatctctttcaaaagctagaagcagagagaacacttgctaactcattctatgaatccagcatcaccttaataccaaaaccagacaaagacattacaagaaaactacagaccaatacctgtcataagcatagatgcagaaatcctcaacaaaatattagcaaatcaagtccaacaatatatgaaaataattaaacaccatgaccaggtggaatttgtcctaggtatataaggctggttcaacattcaaagatcaactaatgtaatgaatatcaacaggcaaaagaagaaaaattgcatgatcatatcaacagatgcagaaaaatccaaacagtctttcatgataaaaacactcagtaaagcaggaatagaggagaagcccctcaacctgataaacaatatctaaaaaaaaaaccttacagctaacatcatactaaatggcgtgatggtgagaaacctgaagctgtctcactaagatcaggaaaaaaaaggtgtccccatcactactgcttttcaacatgatactggaagtcctggctgatgcaataagacaaggaaaggaaataaaaatatatagattgggaagaaagaagaaataaaactttgtctttgtttacagatgacatgatcatctatgtagaaaatctgaaataactgaccaaaaaacaaaacaaaaacaagccccagaaccttcctggaactaataagggattatagcaagattttaggattcaaagttaatatacaaagtcaattgttttcctatataccggcaatgaataagtgaaatttgaaattaaaagcacatgattatttaaattagtatcccttgaaatgaagtacttaaggtataaatctaacaatatgtataagatctacatgaggaaaactacaaaactggtgaatgatatcaaagaagaactaagtaaatacagagatattccatttcatggagggactcaatattgtcaagatgtcacttcccagcttcctctgtagattaaatacaatcccaataaaaatctcagcaagttattttgttggtaccaaaaaactgagtctgcagtttatatggagaaagaaagctacagtactcaagacgatgtggtgttggtgaaggaatagacaaatagatcagtggaacagaatggagagctgagaaacagacccacacaaatatagttaactgatccttggcaaaggagcacaggcaaaacagtgcggcaaagagggtcttttcaacaaacggtgttgaaatagctgcacatttgcacatccacaggcaaaaaaaaaaaaaaaaaaaagagtctaaatacagacctaacaaacacttttcacaaaaattaactcaaaatcggtcacagatctaatgtaaaatgcaaaactatacaactcctagaaggtaacatataagagaaaacttagatgaccttggatatggcaatagatttttagatagaacaccaaagacatgatcatgaaagaagtaaatgataagctgaacttcagtaaaattaaaagcgtctgctctgaaaaagacaaggtcaagataatgagaagacaagccacggactgggagaaaatatttacagaagacacatctgataaagaattattatctaaaatttacaaagaactttaacaaatcaacaataagaaaacaacccgatttaaaaaaatgcccaaaagacctgaacagacacctcaccaaagaagatgtacagatggaaaacaagcatataaaaatatgtcccaaatcatgtcattagggaattgcaaattaaaacagcaatgaaacaccaccgtacatcttttagaatggcccaaatgcagatcattgacaacactaaatgctggtgaagatatggagcaacgggaaccctcattcatcgctagtggaatgcaaaacagtacagccactttggaaggcagtttggctgtgtcttgcaagactaaatatagctttaacatatcatatttacccaaatgaattgaaaacttatgtccacacaaaaacctgcatacagatatttatagtggctttattcataactgaccaaacttggaagcaaccaaggtgtccttcagtaggtgaatggataaataaacagtggtacatccagaaaatggatgagtgtttggtgctaaaaaagtgagctctcaagccataaaaagatatgagggaaacttaaatgcatgttactaagtgaaataagccaattttataaggctgcgtactgcatgagtccaattatatgccattctggaaaaggcaaaactatggagacagtaaatagatcagtggttgccaggggttgggaggacacaagatgaattgggagagcacagaggatttttagggccgtgggactatcctgtatgattctataatggtggatccatgcctttatacatttgcccaaatccatagaatgtacaacaccattgtaaacaatggactctggggtgatagtaatgtctcagtgtagactcatccatttccacagatgtaccattgtggtttggcatatcactcgtgggggcggccatgcatgcgggggccgggggtaaatgagagctcttggtaatttctgctctattttgctgtgaagttaatgctgctctaaaaaataaaatttatcaagtttttaaaaaaggggtggaggaagctatttccgaccagtgaaatgatatacccaggacgacattgctcatctgggggcaaaacctggtcttctgaatccagggttcctaccaaacactggaagaaaggctgttgcctgcaggttcagggaagtgtatggtacatttttaaaataatgccacagtgcatgcaggggaggaacgccaatcttaaggctttgatttctggaaatttacttttgtggtgtcactcataactgattggaaaggataagagtgtgtgtgtgtgtgtgtgtgtgtatatctgtgtgtgcgtatgcatgtgtctgtgtctgtgtgagtatgcgtgtatctctgtgtgtatgcatgtgtctgtgtctgcgtgtgtgtgtatgcatgtgtctgtgtgcgtgtatgcatgtgtctctgtatgcatgtgtgtatgcatgtctctgtgtatgcgtgtgtgtgtatgcgtgtgtgtatgcatgtgtctctgtatgcatgtgtgtgtatgcatgtctgtatgcgtgtgtgtatgcatatgtctgtgtgtgtatgcacgtgtgtgtatgcatgtgtctctgtgtatgcgtgtgtgtatgcatgtcttggtgtgtgtatgcatgtgcatgtatgcgtgtgtgtgtatgcgcatgtctctgtatgtgtgtgtatgcatgtgtctgtgtgtatgtgtgtgtgtatgcatgtgtctgtgtgtgtatttgtgtgtatgtgtgtgtgttatgtagggagagggtgcttatattgttactgtgttacttatgaaggactggggacattattgttgcatagtgtaacattcagaggaatcctcattcttttagaaaaggaaaaaatctctatgaaggtgcacacagggaggaaccatgtgataacaggccacatgttttgttgatgcctgttgtcacagaattagaaaatacacagaagaaattcttacagtgcagttgtcgagattgcggaaagttctcatctaccctctaatgccccatgagacacagcaagctgaccaggtaaactatggaccctgggatcttgttaggcctgactcccacagtgtgggcatggttcagggatttgaatattaatgtcctctttctgaaatcagaccctcgactgacattcccagcattcttttttttttttttttttttttttttgagacggagtctcgctctgtcgcccaggtcggactgcggactgcagtggcgcaatctcggctcactgcaagctccgcttcccgggttcacgccattctcctgcctcagcctcccgagtacccagcattcttaagcagtaccatgtccagaatttctccagggtttgtgttcagtacggtggctgcagaattgttactggtgagcagagtttattcttgcctggtccatggggccagactaaattgagctctgaaagtttcagtggtaaattccactttaccttttatgccaatataggggagtctattctcaagttcaaagccagatggaaaatggcaagttcaagaagaaatagtattctggaactttgctctgggggcaaaaatgagtatttctgatttgaaatcaggttttctgaaagaatccataagtaaattttaaaattgcttttgtttatatttgtgcttattaaaacactccctgttctggaccaatcttaatcttctaggcagaatttatttagtgttaagaaaatggcaactctttggacatctgttacatgggataatacaaaaataattttgaaaattttttaaaggcaaatgtgactggagtgtgggcatgagtgtgatatgaggatgatggcttgaagaagagccttttaagaagcaatttggccacctaagtgcatcccatcttaggaagaaaggatgggaataccccagacctggcgtgcggagggagctcctgtgtgctgggtcctactccacattaccttgggttctcccaaggctgtctgcaggtggagcagccctagggagcctccgccccatggggcctctgccaggtctcctcgagcctgcgggagagtggtccacactgagaggctgggagttaccatggcagccaagcacatcctcggtaaccaggcacccacaagtgctgggagtttccccagagtacagtctgtgcagacagtgggaaaggaaagagcactttgccaacacaggcagacacttggggagtcaatcattttggaatcctatgaacttgtgagttcactgttgtctctgtgtggctcttggttaagacgaggaagcactgggctgaataaagatgttcaggagcttctttggcaagctggtcccctaatggcatgctgcaaaggacaagaagatcccactggaccagtccagctgtcctttcagcacaagacctaactttatgctgctctcgtcagttaccgggctgagaccatgtatacgcccaaccatcactcatagactctctgggcaattatgaagcaggaacaaaatgtacatatatatatatatatatatatatatggttagactctgaacatatacgctcggttaaaattggtggtggctattaagtggtaaggaataggactaaccccaataataggttgctggattgtggatgctcaaaaatgatattaaccttccaacgggggtgccaggaaaagtgaagttttcgtggtgagatgagggagcaaattaagagagagcagctggggggaatggttggctgacaatctgccatcacccgaaagctgtgtgggcaccaggagacagcataagttgtgtctgtaagtgctgcaatgcagagttccttgcagataataacgggacttgaaattgatgccttcatttggtgaccctgatagaggtggggatgtgcgatttcttttctctttctttctttctctttcttttctctttctttctttctttctttctttctttctttctttctttcttttcttttcttttcttttcttttctttctttttctttctttcttttctttctttctttccttcttccttccttccttctttctttccttccttccttccttctttctttatcttttttccttccttccttccttccttccttccttccttccttccttccttccttcttttctttctttttttgagactgagtctcgctccgtggcccaggctggagtgcagtggcatgatctcagcttactgcaacctccccctcccaagtttaagctattcttgtgcctcagcctccagagtagctgggtgtacaggcaggaactaccatgcccagctaactttttcatatttttagtagaggcggggtattaccatattggccaggctggtctcaaactcctggcctcaggtgatctgccaccttggcctcccaaagtgctgagattacaggtgtgagccacagcacccggccttgtgagatttcttagccagggtgggattctattggttgtggggtggctcaaacaaaccaaactcccagccttactcaaaaagagggaccaggtcagactatctggagagagttctgccattggcccgatgactgagtctgtgcccacggcatcgtgataccaaaacgtgagacttcctagagaaaagagaattagatatgtcatgaaaaagaaaagcactgagatcatcaccatgagaaaatcagaacttttggggatttccttaccctgactccatttattttacttggactttcacatgggagggcacccctgtgcttagcagatgctaaaggtcttaatttagtcatcattcctgacccagggaggtgctctgtggggtcaagggtgtggggcaagttaagcttgaaagatacagggtcccccggaagatacttctagggggtcattgtccagatgggcaagagccagaccctgcagggagaagctcccctagagagacctcagtgggtgggcatggctgaggattttgttctgcccaagtctgagctacgggagggtatttctcatacccatgcccacagtcagcaatgctgagagatgatgtcagggcgatgcccgtgatggccggatctgaggacagtgctccttcccctcttctaagaagactggctgaagacccagaggtttgggtaatgcacggctgaccgaaactctgatctctgcactccagttgatcgagttctactagttgtgtttagtgataagacccaagactgacatactccataaggcattcagcctggactaggctctttgtagccaaaagtctgctcctaggctcctggaagaccttgcccttttgcttgaatgttttgtgatttctatcagagttttagaaacgatgatgattacatgtttatttcactagtgcttgttggtagcagatatttacattgcctgagaaaaacagcccttcatattcttataaagattggcttagttgatatcacagtattgatgatcggtgttaaaacaatgggcactgagccttaatcttgaaatgggcaattacacaaagtcggtaggaacatttcattctctgaaatcaagatctgtttactatgtggccacaattctccggccaaccacagtgcatgttgggatttgcatctagggggtatagtgtctaaaaataactctataaatactgttttcatcagtgataaatctaatctccatcacttaatcatgttgaccaccccagtgaaatatttttgtgtgcctttaaagtattttgccttccttttcctaggactctcttattgaattaggtggatacatgaagctttcttttaccaaggcaatgaggccaagtaaaagtttgactccttttacatttatttaagttttatggtgttgaactttgagatttgtttcctcccacttagttgtttcctcccactcttccatgcagttgaagggtcacaagctttttgcatgatctatattgtagataccattacctacttagtttcagacgcaggatcaaatccatcctttatctgtcgacaatataacaacatcacaatgatttgttacattgttacttttttttctttctcatctgatttccaggaaagcactcataagagaacttgatatgtttttccatagaactaaaaagataaggaacctagcttggctgactacctctggcattagaaatgcttccttagaagacaagggagttcagcttagtgacacaaagaatgccatttaatattgactcatctaaaaaccccaaggtctggactttttccatccattatgtctgtaattaccaatctttgtctttgcttcagactcagaaagcgcaagaaatccaacaaccctttactatacttccgtgtctccctgagctcttttcaaaggaccttttggttttccataagaagcatttagttctttaattacacattaaacttctagcttagtggctagagagagcaaaaactagcgcaattaaacatgagctagttccaggttcacgttcatcaccttgatcagttgtaaactgtaggctagagaaaactagcaagaaaacagagggagacatctgggccacctatttaactctcctccaagagagcctaagagagaagccatgtggaggagcgaggcgggtttgatgtgtggcaaccactgcaggtctgggctgctttgctgagcagagactggcagcctgagctatgtacatcatccaacgcctgagggtgccactgaagcaatatttcagcggctgggctgggaatgcccatttctctgtagttcattaaggagtaattttactgtatccactttctgagttgaccgctagatcctggctggctgttgactctatttgccactctggaggaatggcatgaaaaggaaggattcttcctttgagaccctaactgaatgactgggctctctaagtcttgtgaagcagttgtctctttgacaaccgaaaaaaaagagttatgttattttgaacagacttatgagtgacttcaataatttatgctagaaaaaaagtcattcttctatattgcctaggactctcttaagagtacagtacaatatttcatagtacttagtactcttacatactattattaatagtactattactagtacttaatagtaccaatagtacttaacagtacagtacaggggtcagcaaactttttttatacagggccagatagtaaatatttcaatctttgctggccacacggtctctgttgtaattactcagctctgtgagtgcatgtggaagcagccataggcaatacacagacaaatggctgtggctgtgttccaataaaactttgtttgtggacattgaaatttgaatttaggatgattttcacatgtctcaaaatattcttcttttcttttttttcccccaattattaaaaaatgtaaaaattgctcttagctcacaagtggtacaataacaggcagcaggccagatttttttttttttagcagatttggtttgctgaaattttttgtagtaaaaatagcccacagcttagggccctgtgacctggatttgagacaaggagctatgattcactggcctttaaacttggccaatttgcccaaaccctagttttccctctataaaatgtaaattataatactcaacctctcatggtgaattagaatgaaataagataatttgtacaagtgctcttaatgctctcaaacaccacaccatgttgggtaaaatattgttgggttattattatatattctgtgatttatcaaaatctcttagcagccttctgacagaattttgacttctagatgacactctgcatctaaagcactcaagacattaaaggcagaaatattaggaagaggcgtgctttactcaattttaaattaaaggctaacattttcttagataccggttggccataaagttcagaaacaagataatgttattttagtgtattgtaaagtaatatcaatgaatcatctattatgtatatgttacctatgtttttcaatgttaaagccatccattgaaaggaaatcatccttgaagataatgtttacaatatatagaggacactgaactttcaactaccttcctgacatttttaaatcatacagagtatcacccaagtcaaggaaagaaagactgaagagtagccagactattagcaaactgttttggaaatgatttactatgagtattttaattgtattctctcagcaaatcaaatgatttcccattcttctggtgagttcaggtagttttctaatagcattcttatgccccctttctctgtccaccagttcccacctttgtaagcagtttctaaatatcccaaagacactggcttaaatctaaataaaaaagcaaaggggaaaaaagtaagaaaactgaaatgtaagaaaatgtagggatggaaagcataagaatgttgctctggagaattcaaaatttagactattaaatgaagtcatgaataatttttaaattggagtgcagtgaaaaatagacatttcagagccctagcttggttagacctgcaagagaaaattgtgcttaagaaataggttgacatttgcagctggatttctgttagggaacataaggtactgaactaaaacaatagaattggaactggagaaccagggaaacagcaaaggatggggatagatggaagaacggagtgggggaagagagagttctgcctcatggacatagaggggatatatgctggaacaaccaggctggaaggccatgtttgaaggaacagaaaagttgacatttgctatgttaatgtaaaagagtatagcttacccaggggacagctaaaacagaaatgattttattggttccataaagttgatttataaatgaatgggtgctcttccagttggagagcacgttggggtgggtggaggtgagaatccgaggaactcagcagccttgtggtggggggtcatgcttgcagctgaacctgcccttccatccaggagcactttgttctgtcaaattggggtcaactgtggcaaaccataacccttaaattccaaattcttatctggctcacggatcccaccatgctttatggaaaaatgactcaaatacattaaccaaacagaccaaaggatctagttgagagtgatcttcattagttatggatactgttgtattaaaagagacttttaaaaaattctcattgcacttggtttgctaatggagtgactgagggaatgaggactggatattgcggaatagaatgagtggaaattgtggggtcaattttgttgagctgtcttaatggaaaacaccattcactcactactcgctgcttagaaaatcagtctcaatgaactttcagttccaaattttaacagttgacacaaaatacactgttaaactgtgttaacaactgtagaaaaatagacatgtttgatagggacattctagtaaaaggttcttcaggagcatccccatgtaaagattcagaggctcacattacaaaaacgagatttggttcaagttctgtctccaactacattgacaacaaagacagtgagaaacagggagagacctcacatctgggtgcccgtcacagacacagaactgacaggtgcacgtggccaacgtgttgtcaaggctcttcgttcagttgtgctaaagggcaggcaagcagggatgaggccctgagctgcttgctcttccaaccagacacgggggtgtgcgctgtcctttaaaccttagcaatggaattaaaaaggcccagtgagtcttcaagagctaaattagaagacattttgccgcccctattccatcttgttttgtgcctgccatggcctgccctgcgaccctggcaaggttgcaggggagctccccaagccaagagtgcccttcattaggctgcagagaggtcaagccatggctcctccccgcagcctcaaggggagtgtatcgagcttcctcctcccggaccaccacctccttcttagagtgtgcgaaataaagaaatgattcaacagagattcaatgcaaaaaaggaaatgctggcaaacaggaaagggctatagccaacagttttgttttccttaaagtcagtgccaagaggcagttgtcctgatccaaggtctctgagatgggagaagagaggccccgaggttatatttaggagccactttccttatcctgggacttcttttttagtagacaaggtccccagactacaccaaaggcctgtgcgatcaggtcagggaaggcaagggaaacaaagagggacagctagtttgatctctttgacctccatggtgcagagcctcaaactgagcacagctgtaggagctgaaaataaacttggatccattcaatgaatatttatgatgggcaactgtgttaaagaacaaacagcttataaatgcaaagtgaatgtgaaagatctgtaacagtgcaaaatctccacctgccccggaggtttgatctaagatttgtttccttatttttttcattttaaaattcagatttccagtacaaatacccttccttccttccttccttcctccctcccttcctcccttctttcctttttgcagattaaagtgaattaaggctggaatttttttatttgttttcttttgattgacagacactggatttgatttctagcctgtggcatactctagagacatttcttagacaatcatcaagattgttgatctaatctttgaatactgaactctggtcatttcaaaataataaaagatcacaatgcaagaaatgctgatggataagccccagggacaggcgagatgtcattctcagaaagccagatagagtcaaagtgagaggtcgatgattataatgcatgccactcactacatgcctttgtgaatttcacggctttagacccaaaccatcttctgctaacttaccatgtctcattgtaagagtgtagagaaactacagctggagaatcaatggttttgcagaaaagtttcctaaattattgtactacaaagggcaagagctcatgtgaaaagtaaaaacatacctttggtgacaggctagagaatatttccttcctggtattccccctcctccaggccagttagtgaggcccttgttatcttttaaaaaaagacatctgttttgtaacatttcacagtatatcagcatattggtggtgggttttgccatctaccagacctctcaatttcccccagacctatggcttgttggattcaatgaaaggatccgtgtgggaacagtgaggtaccctaacgtctgccagtctgagacacaaacaaaggccatgcactgaagggccagccgtcaactggatcaaaataacctggaaaacacagacatcaaaacagaaatgcctactgcatgttaggaatctttctttctttctttttttttttgcttcttatttctaaagttatatatctaaacctacattaatgatacatctatgtacagtatttagcagttctgttctatggtacttttgtacatgctgggttttattactaattacaaaaagaaaataattacataaggcatatatatgtacagtggtttgtcttcagctcacctgggccctgtaactgccacacccacatgggggcaagcacctcaccctgtagtagatgaaatgaattgggatccataaaactgagggctccactctgtgtctcactgaatgaataaataggcaccagaaaccttgcttgtcatatcccaggtaaaatctttgacacacctttttgagtgatctggtattgtacaacacatgcaggtaagtaactgaaatctccaggagttggatgtgtagtattttgggaggagaccaggcttgggccacaaatgagggcactttgcactttcatcaaatccatgtctaccttgtcaatctgaataactgagagagggcaggtagatattttacaccttgaagatttgttttctggtcatgtaaaaattaaatataaacaaataaagaacaaagcaagagagacagaaaaagaaagagaatgagagacaaggaaagattgtgttggggggagaagagaagggtttgcccagctagggcactaaactttggattcattctccaggtttgccacatcaccatttctttctgtttgctcttcgaggttcttttcttcctcttcagtctccagttctgcatgttggttgagtttgctggatacagaccaactcaggggcagctctgccctgctggctaactcggccagctctttggcactaagggatggggtgctggtctcataggtctcatggaagctgttgtagtcaacttcgtagaacccgtcctccagggtcaggacaggtgtgaaccggtaaccccacaggatctcactggtgatgtaggagcttcgagcttggcatgtcatccctgcagagagaagaatggaggctttagcatatgtaagtgtgggctttccatggccaaggagtcacagagagccaggaggagtactgcatgcagctgttgagactgacctgcatacgatgccacacttagtaggtgtcattcatgttgtagacacatgctaatgtgccatggagattccaggcctcttaagggagtcctggggaacaatgagagagtcctggcccacatcaagccacatttgcctgcatggccatgcacatgcaaaggaaatcaagtgtgcaaatgcacacaagttttcgcatgtgcatggctatgtctggtccactctgctctgggagaaccctgaagccatgactctggcctcctactgctcttggaggtttagcctgggttctaatgggatttgagctctttggccacagacttagaatgaaatttcatatatggaactacacttaggctgcttttaagctagaggccacagatcagtgttaccctcccacctgccattaacacacaggccatgactgtggctccagatgcagttggaagggtcacccacctgaatttgcactttacttaggcccagtggtcatagttgctcagactgtgcaatcataactactttaaaagcttttcccccttcttttttttttttttctttgagatggagtctcgctgtgtcgcccaggctggagtgcagtggtgcgatctcggctcactgcgacctccaccttcaggattcaagcaattctcctgtctcagacttctgagcagctgggactacaggtgcacaccgccatgtccgactaatttttttttgtattttagtagagacggagtttcatcgtgttgcccaggctgtttatgaactcctgagctcaggcaatccgcctgcctcagcctcccaaagtgttgggattacaggcgtgagccactgctcctggccacttttcccttttcttaaagataagaagcctttttgtaatttgcataaaagcaccacgtgagctaccagcagccctggagtcaggaagtagctttctcttaaatatgaaatggcagaatgaggaaaagtccagccacctccttggaaaataaaaataggcaacaagtgtggcataagatatgagaaatgacacgtgtggttttttaaaatttttttctgaggtcaaagaaatcttttatacaaattctcaggaaatgaaaacattcattcagtcattaatccagggctgacttctccattaggcaaaaaggcgtggtgtctatggcccatgatacttttagaggcccgtgaaaatgttttaactcttttaaaatcagaaaaagataaacttttagatggaatggtaatatatttatctttatgccaacacagttgtaaaatataacttaaaacatttttttaatggggcaaggggcttacaaaggcaagctcaccagggactcatgaatataatactgtggccctgtgtccattcaggagagcagccagccagccagtcagtatgtcatctgttaggaccaccaataagtattacgcagctgctttgtgctgaatgcaggtggattagggagaagagaatacctgtgaatgtttacacagaaggatccagagctacacaacattcctgcagcactgcatttgctccttgtgtctagaagaagaaactggggtgccagggacctatgtggttgactcagctacagctgtcagagcctgagccagcaccagccctcacgccagctctgtgctcttcctcttaatctcaaaaccgaaatgtgaccctttttcaatgtttccctgaatgacccacagaagccccgcctttatgcctctaaaacaaacattgcagggcttttaggtattaggaaaaaaaaggtcaacactgatttgattttacttctcaaacaacgtttctcttctgaattattttctttatctgtgcttgagggtggggtgaagacaggtgatggcagtgatatgtgggctcagaatgagaaacaaacaggaagtcaagaggaaaaggtgatccaataactctttttccaccaaggaagtacatgtttatggtaaagtggctagaaaatagggctgtgataacagttggggaaaatagcaagctaatcaaagaacaaaaagaaattctggggaaagaggttcacagggagctttggaaagctctgacatattcctgagaaactagaagaccacatgcatgtgtaaggctgtgcacatgcccaagaaaaaccagagaaggccctgagctctcacttctggttgacaccgagtctctgtgcaagtaggaggtgaaggttaatgcagttgtaaagtgcctgactgaatgttgaaggcacgtcccaccatgtgcatagagacccttgacaaagactgggagatttttggttactggctcttaagagaatctgtctaattattagctgatcactaaattaactgagcagagactttagtggccatatacacaaaaagtacagaccttacaaaattagctcaggaaagttactaaaaaacaaatagcaatggcaacaaaaaactctgaaaaggagggagaatctgattttcagggttactacattatattacttaaaatgcctgttttcaacaaaaatttatgacacatgcaaagaaataagaaagtatgtcccatacacaggaaggcaagcagtcaatagaaactgtccttgaggaagcctaggcattggattcactagagaaagactttaaatcagctatttgaaatatgttcaaagaactaaaagaagccatgtctaaagaacaaaaggaaattagggaaacactgtttccccaaataaagaatatcaataataaaaataagttacatgtaaaatcccaacataaattctgaagtaaaaagtataataaatgaaagaaaagaattactacaggaacttaacagatttgagctggcagaagagaatcagtgagcctgaatataggtcagttgaaattattgaggtatagaaagaaaaaagaatggagaaaaatgaacagtgcctcagagacctgtgggacagagcaagcataccaacgtacgcataataggagctccagaaggagagtataaagagaaaatagcagaaggattatgtgaagacgtaatgactggaaagtctttagttcaatgaaaaccattaatctatacatctaaaaaacttaacaaaccacaagtaaggtgaacccaaagagattcacactgagacacatcataatcaaactgttgaaacatgacgatgaaggtagaatcttgaaggcagcaaaagataaacaactcattacatgcaagtgattttcaatgatattaatagcttattcctcattagaaaccatggaagccagaaggccatgagaagacattattaaaagcactgaaagaaaaagactggcaaccaagattccatatccagcaaaattatccttcacaaatgaaggagaaatgaagccattccatgaacaaaaatggagagactttgttgctagcagacttgtactccaagaaataataaacggagtccttcagactaaaataaaaagacactagatagtaactcagatgagaacaggtgtgttcagggtggtatggccatagactagaccgtaactcaaatccacatgaagaaataaagaacactggaaaaagtaactacataggtaaatataaatgtttttctccagcatgattttaaggttattccattttatggcaattatactattccattatatgaatatatcatggttttatttaatcaataaaacaaagtgatccaaaatatgtggtgggtctgtttgttgggggaaatattaataatattggcttggtttgtgtaggttgtcttaagtgtactattatgggctgaattgtgcacccccacccccacattcatatgctgaagtcctaatctccggtatttcagaatgtgacatgtttgagatgggatctttaaagagttaatcaaattaaaataaggtcatactggtgggccctagtccaatataattgatgtccttataagaagaggaaattaggacacagacacacacagaggaaagattatgtgaacagagggaggagatggccatctacaagccaaggagaggggtctcagaagaaccagccctgttcacattttgttctcagacatctaccatccagccttgtgagaaaataaatttctgatgtttaagccactcagtctgtggtactttgttatggcagcaaactcaatacacttactgacttctatagggagaggaaaatacctttccgtagtgccatttgaagaggagtatttaatttatgtaataagtaagatttaagtaaatgctcatggatgcttttccaatttttattcatttttatatcagaactcatttaaaaaaggataaaaaagaatattaatgtttgcctatcagtaaaatattaaaaagtatttctggggtaaattgataattttcttcagaaaaattcctgtcttacgtattgacttaggtcccagtccagtctttaaaactgtgatgttttactgaatttggaaaagtagcaaaataaaaccaactgagttagcctcataagcaaggcagaactgccaagatgacatctctgtgtgtgtgtgtgtgtgtgtgtggtgtttatgttccatatcagggacatcatcataaaggctcccagaactaggttattttgtgagtaaagtactttctggaaaaagagatgcttcatttggtgaagagcaaaacgtggaaaacctgatcttgatctcctttgagcatgcagtcataggtgtctgtttttcttattgtattgtgaatgccttgaggatctatttgtcttgtttatttccatattccttagcatttgcacagtgcttcaatattggaggttcccaataagtacttgctaagtgaaaagagtggacttggggaactatacagaaacagcttaatattgttcgttggccatgtctgaatttattattaaataaaaagatggcttgtgagtcattagaaaagaaagtgggagatttctgcttccatcatcatgtcagtctgcatatgaaggacccttagctaagatataacacaatgctggaaaattacaaaatgtcttacctttcgttttatgtatttgacaagtaaaaattatacatattgatggtgtacatgatattttgatatacgtgtatgttgtgaaaaggctaagtctagctaattaacatagccattacctcacacacttatttttttgttgtgagaacatttaaaatctactcttagcaatttttgggtatataatgcattgttgttaatggtagttgccatttgcatttctatttttgtgacagtgcttgtcctctcctttatcttgaatgcccttcccatagtaaaatgctgctcatctttcaagagctaactaatgtgtggtctcctttccaaagcacattgtgaccaaccagtctcttgctggaactatcgagttccaggccaccataacacttcagtgacctatcacagcacttatcagagtgttttacagcagttatatgtgtctgttttccttgctgaattgtgaatgccctgaggatctattggtcttatttccatattccttagcatttagcacagtgcttcaacattggaggttcccagcaagtacttatggttaagtgaaaagagtagacttagagaaccatacagaaacagcttaatatcgttcattggccatgtctgaaatgtattattaatgttaaataaaaagattgcttgtgagtcattagaaaagaaagtgggagattactgcttccagcgtcatgtctgtctgcagatgaaggaccctcagctaaaatataatacaatgctggaaaagtacaaaattcataatttgaattaaacctgagttcaataaaagcaagagatgagccttctggggctggtgaagagggaataacacgcctattccttcccaccaagtatagttgaggcctctggacaatgtacaaaatgaaaccacctgaagactctagaaagttcacaatagcaggacgattggagaagggagtcaaaacttgaggaatgaatcgtctgaggataaatttttctgccttcctcttttattttctggctttaacctgagagtggccccagtgtagaactggggccccaatgcagaacaagtgctggcaagaaaatctcagagagaaaccctgcctttctaaccggaggaccaggaaaaggtgctgctgtgagtcagagacgggagtgggaatccccgttaattgagtgtgaggacttccccaccagccctgagtgcagcctttgtcctcagctgctctgcagtgcagcggtgacacaggtgccaaaaactgagagagagcctgtctttttggaccgagtattgggaaaggggaattccagggaccagagtttgtggctgcattttcctctttcctctgactgctttaccctaagagtggccccgattgtgtaaaacaatgcagcagcccaggtggctcaaatgctgagcaagtcttggctttagagaaagaagtatcagaaaaggaggcccgggagctgaaagtgggggccgaccggggggaggggtggatctcacagaggagagaactggagaagaggatttccagattctgtgtatgaattgatataatcgtgagctttgcatgcacaggacggaaaacaataagaaaagatgaacttaaaaattacctcgttttggaatatatgaccacacttctaaatgtcaaagaagaaaccataatggaaatttgatagtacttaggactgagtgatattgaaattctaaatataaaaattaaagggcatatagaaagtaagaaaaatttatatgcctaaatgcatatattagaaaacaagaaagtctgaacattaatgtttagaatattcaactgaagacattaggaaatgaacaacagaattaattcacgggaaataggcaacaaagatcattgtataaattaataaaatataaaacaagtcaaccacagtgagaatcaataaaggcaaaagttgttttttgaaaagtctagtaaaatagacaaatctctgatcagactggccaagtaaaaggtgtagaaggcaaaaataaatggcattgggaactcaaaggtatacataactttagaaacagcagagactgaaaacacaaaaggagattataataacttaaaaatatagacgaaatggacaattttctaaatcatataaattaccaatacttatttaagtaaaaataaaaagcagagataccttataaccaattatgaaattgagccagtgattaaaaacttgccataaagaaattacaaagcccagacaatcttaaagatgagttcaatgaaatattctaggaagaaatcatgataattttacataaactctcctaggaaatagaagaatcatttcctaactcattctataaggcaaataatcttgataataaagtcataaatatagtacaagaaagagagaaaaaaagggagaacacaagcccatattattcacttgtgtagctacaagaatcctagaagaaatattagcaaaccaaatctaacagtttagaaaaaaagacaccatgatcaagttgggtttattccaaggaatgcaagggtggtttaaccttagaatactgatcatataatttatcatgttaaaagattgaaagatcatttaaatatgtgcatagaattcatttgataaaattcaaaaaccacttatgatgaaacttcttaataaactttgaatatgagaccaactgtatctaccaaaaatctaaacaatcattatttttgatgatgatgatgatcaaaagttaggattgtttaaagtcaggaccagtgattttaaatacagatgcagtaaatgcttgctatcaccttttctattcagtattttaccaaaggcctttgccagtaaaaataagataaatacaataatttgattcaaaaataaatgaaactttcattatttgcagataatataactgtgtacatagaaaatccacaagagtagtacaactattaggattactaagaatgtttagcaaggtggctagaatttaaaaatctatgcagaaaacttatgtatctttttatataccagcaacaaataaaagacataacagcaacccttcaccatttcctctagcaacaaaaaaaaccctagaaatcaatctaataatagaaatataaaacctttatgacaatttacaaattatacaatttgggagacagtaaggaagatttaaataaatggagagatatatcatgttcatggataggatgattaaacatcctaaagatgtcagtttttcccaagttactttatagattcaatacaatcccaacaaaacattcttaaagtcaaaaaaaaaatggatttgacaaatcctttcttacaccatgaggaagtacaaagactcaaaagtcaaaacactcctggagaagaacaaactgtagggactcactctattagatcacaggacatatttagtaagtatggacatgtgcaacaggaaacacgtatgattatgttcatagcagttgttatactttggatatttgtcctctccaaatcccaggttgaaattggatccccagtgttgagggtggggcctgatggaaggtgtttgggtcatggggtgcttggtgccacgcccaaggtaatgagtaagttctcgttctatcagttctcatgagaactgactgtttaaaaagagcctggcacctccatcccctctctctcttcctttctctcttgccatgtgagcgtcatgcacctgctcccttttccccttctgcaatgagtggaagcttcctgaagccctcaccagaggccggggccatgcttcctgtacagcctgcagaatcaagaaccaaatgaacctcttttcttcataaattacccagcctcaggtattcctttatagtaacacaatgaactaggacagcagtatcatttttaacaaattggaaacaacccaactgtccattgacagacaatggcatatattcacctagtggaattttaagaagtactaataagtaaattacacatgcagggtctaatatagatgaatcttagaaacataatattccacaaaaaagcaagttttataaaatttaaaaatataccacttttatgaagttaaaataagcataagtgaataatatagtatttaggaatacatacaaatcatttttttttttttttcagacagagtctcactctgtcacccaggctggagtgcagtggcatgatcttggctcattgcagtttctccctcctgggttcaagtgattcttgtgtctcagcctcctgaggagctgggattacaggcttgcaccaccacggctgctaatttttgtattttttgtagagatgggtttcgccatgttggccaggctggtctcgaactcctggcctcaagtgatctgcccaccttggcctcccaaagtgtgggattacaggcatgagccaccatgcacagccaaatcactttgtggttttttttaaagaaagcaagggaatgttaaaaacaagtagttatattggggtgagaaaggaatatagaagtagatataatggttagcagtgttctagctcttaaattgagtggccaagttacaagtattttatataatattactttattttatttatttattattttgagatggagtcttactctgttgcccaggctggagtgcagtggtgtgatctgggcttactgcaacctccgcctcccaggttcaagagatccttcccccaagcctcccaagtagcttggagtataggcgcttgccagcacgcccggctaatttttgtatttttagtagagatggggttttgccatgttggacaggctggtctcgaattcctgacctcaggtgatctgcctgcctcagcctcccaaagtgctgggattacaggtgtgagccaccgcacctggcctattattttgtttttttgagacagggtctctctctgttgcccaggctgtaatgcagtggcaagatcttggctcactgcagcctcaacctccccaggcttaggtgatcctcccacttcagcctcctgagtagctgggattacaggcatgtgccaccacacctgactatttttgtattttttgtagagatgggtttttgccatgttgcccaggctggtcacgagtttccaagctcaattgatctgtctgccttagcctcccaaagtgttgggattacaggcatgcgccaccacacccagctaaattacaagtgttttattatcacattttataacaatatgtgaggtacattattttgtacttatcaagtactatattaaaaaatcacctaattccatttttgttggaaattttttgtattacactgcttgtaattattcatgcaaaggtccttcttgttcagtgttttcagaaccattaactattcacgtatttggtggtgggtaggggagagctactggtctaagtcctgggctctgaaggtctgagaacgtggagtactgatgtctgagggagaggatggacacccatctctagaagagagagctgatttcccttttccctgccttttccctgttctatctgggtcctcaatggattggatggtgcccacccacacaggtgagggcagatcttctttactcacttcagattcaaatgccagtctcttctggaaacaccctcacagacacacccataaataatgtcttattagctacctgggtatccccagcgcagtcaaactgacacgcaaactcacccaggacaggaaggctgcttgatttccacagtgttgtctgaactaagttatttctccaaagggtgtgtaggagtgtgcgtgtgtgcgtagcttttaacaattatttcattccgcagtttctccactgagagcttctctgtctggatgcctagttattcttccaagagttaagcttgcagggacatgcatgcaaacaacctgtctttgggtggccgtttcattcccaataagaccatgtgagaaggagagcttggaggggaagggagtgcgtgttacgggtggtgattgcaaagctcactctgcctaggatccaggaaaacagactgaaacatagctaaggaatgtgccataggcactgagcaaacacaggggcaggccctgcaagatggagatttaacaggcaaagccctatttttagatcctgtgacaaattatggtgggagaagtttgtgtgcagaataccaatatgatgaaagtcatcctcatgagagaaccccctggacaaagccagaggtatagtcaatacatagacaatacatgaaaacagcctggaggatatgattccaataaaattagatggatacaaaccactctcaccacttctgaatactgtaaaatgaatctgtattgccaatattcaaaaacagaactgattgtagacacttaaccattttatttcaaacaccaggctacatagatgatgttttccttttcctttactcctgtgcccattctcaataagaactgtgctgaatcagtgcagtaataaagtgttgtgcacttagaagtcagtgctgggtcgcttttcatgtgggagaatgatgttggtgattaaccaagcccagtgtcaaaaagaagcaggatagtgtgatttctggcataatcatggttttagttcattaggttttgccaactgccgaacatttaaataacgatgagccctgccctaggctcaggttaaaaatcccttcaatgaacagttgtgtttcttctattacccaaatattagagggccagtgagggtcacctccagttatgcaaaaacaaatggaagtgtggatttttaaaaatgtctaaaaaagatcctacatgtgtactcctaattctattctcaccaaggtcattgataagtgtataaattaagtattgaattaagtaagaaatgttatttattgagtgtttactgtgtgctgggctcagtgtgtgctcggtgtgagccaaccatctggtccctgaaacagtcttctcagacagatgctatgatcttatgtgtgagcaaactaaggcaaagacagattaagtaacttctctgggtcacatagtgctgtggattgaatatcatgccccaaaattcatattcaaagccctgacctccaatatgactgtatctggagaactggccttagggagataagttaagtcaaatgagatcataagaatgggtatccttaagaggaagagacaacagagcatgtgtacgctctttctacatgcacacagaagaggccgtgtgaggacacagcaagaaggtggttgtcctacaagctaggcagagagccctaagcagaagccaaccctgctgacaccttgatcttggactttcagcctctagaactgtaaggaaatacatttctcctgttaaagccactgagtctggtatgttgctgtggcagcctaagcagacaagtaggtacaataggtagtggggtgagggttctcatttaggaggccaagctccagagtctacgctgtcaaccacaacactattatttctacatttgaggacagagaccacatgttaattttgatcttgatttatttttatttttaagatggagtctcgctctgttgcccaggctgaagtgcagtgacgtgatctcagctcactgtagcctctgcctcctgggttcaagtgattctcctgcctcagcctcccaagtagctgggattagaggcgtgtaccaccatgccctgctaatttttgtatttttggtagagatggggtttcaccatgttggccaggctggtcttgaacttccgacctcaggtgagccacccttcttagcctcccaaagtgctaggattacaggtgtgagccaccgctcccagccataaattttgatctttataactgctatagtgtcttacacctaaagattgataacatattttacaaaataaaatggagtgcaaatgaatgatcatagccaaaggcattctgcacaccagcacctggccaccatttgtcccaaattgccactcccttctgcctaccatttccaccctccgctagctttccttttaagcctgtccattcttacctcatcttccacacaaatggtgtttattctctgcccaaatctggggtcctggctaccatcttcagaaaattgcttgcagacaccaggcaaccttcatttacttttaagaaatcacgagatagccccaaatcaaatctcaaactgcaggaaacttcttcaaattctcccattctatatttgtatcttcctcctccaacagtaagaatctgaattctcaacaacctgtatatgtaggctctctcctacaaaacatacaaaacactttcggaacggtcacatccttaactctactgaggaattgcttatgcaagactcagacctcacagctaaggaccagcaattcctccagttgaaaaagaaaatcccatgtcaccttatttagcctgagggctcccaataatgtaccagtaggtgatggaccaatcacaaactgcccaatgcacttgaaagccaatcagaaagcttccctacttccaaaaattctacctaatagaacactcaccaagcaaagattatttgtcttaagacttccttcttttactctataaaacccaccctcctttgatttttcactaggaggaaagtgatggtagcagtcttccttgtatgatctcaataaatagccttttgttaattctacagatgcactttgcccttttgataccaacaactacaaacctctgaggtaaaactaaaaattgcttgcaattcttttaaatcctagaatattcccacgaggttgtacaatcaaaacactgtgttcaaaagttacctgaactatttttttttctatgtggttatgttatccattgcataaacagttaggttcctttgtttctatttgtgtttccctttagggtttgcttttgtcattctttttctattttgtttttaaacttgtaagccatttaaatggttcaaaaatttagtcagcacaaaaagacatattcagaaaagtctcattcccatcctaaactccttctgcccacctccaatgtgaggtcatttttattcatttctgctagatccttgatatggtttggatttgtgtccctgcccaaatctcatgttgaactgtaatcctcaatgttggaggtggcctggtggaagacgactggatcatggaggcagattttcctctttggtgctgttctcatgagattttgtttaaaagtgtgtggcatttccctgactctctctctcttcctcctgctccagccatgtaagacatacctgcttccccttccccttctgccatgattgtaagtttcctggggcttccccagaatctgatgctatcatgcttcctgtacagcctgcagatctgtgagccaattaaacctcttttctttatagattacccagtctatagcagtgaaagaatgaaccaatacaatccttcctgtgtctccttctgtaaaaataagcaaagcaaacatatatgcatacacgttcttgtttcccagtcttttcccatggaaacaatgtttcagaacaagaaactgaataataggttccttctgctaaagtaatttgaaatcacttaatgcattcatttcattttacagagcacagtctcctcaatgaagcctaggggccacactacaggagtgggaggcacacaggcctgggtttgaatcttggctgcttggaatggctgtgggacctaggacaggctacttcacctctctcacttcctcatcagtcacatggggaaaacaatgaccagattataggtgctatcacatcaatgtgaagcatcacatgtgaaagtactcaacacatggctctgcctgaggacaccactagggatgctcttaattcccttcctttccttggtcaagtgtaaaagcaacagctgacctttcttgtagaattagcctcattgatcaatagcgtttgtcccttacatcatatgttttgttgtttgttgattctttcaagtggaataaaaacctccacagggaaagatctggtgatgccatgtcttggcttcctattgatgtcagggtttactttacatatacttgttctttggacatttcaaaatactctttgatgcgtggtatttaaagagtcgcccttcatttcattgtccctcattattctgcatttttcaggcactggttcttaactttttgaggcaaggacccttttgggaatctgatgaaactcatagatcctcttctcttaaaatatacatgcattccaaagtttcccaatgatcaggtgctcatgaactcactaaagcccataggatcccaggttcaaataaaacaaaggaaagcagaagtagaagaataaaacaactcttccagggttaagtgcgtgcatgcatgtaatggggaggaggtttaagaaaaagtagggaataggaagagggaatttacttaagctgcaactgggttataggaacctcacacactttcacagtatccagtgctcaccccatcagaatctttttcaccaaattgtaactgtcaatacttgtctgtatctctctcaagtctggggatgggggtttctgtgggcaggagctctgtcttggccacaattttatctccattccatagtatagtatttggctatatgtctaataaataatggctaaatgagtaaaaagacccagctggtaataatttcatttatttgttcatcatgtatttattgagaatctattatgtgtcaggcactttgatgggttctgagaacagaatgatgacttggccctcggattcattggatgtatagtctactgagaatccgaataaatataaagttactcctgtgataaatgcaatgaagtaaaggtggattatcctatgagactgtaaaaaaggactgtatttggtcttgtgtgcaaattagtaaaaatgtctccctgaggatgtgacatttgagctaagatttgaaggatggataaggcaacgtgtggggtaagggtgaatgccctacaagcagagggaacagcatttgcagggggaagagctgttgtaggaaggctccttgggtgttcaagaagctgaaagtagacgagtgtgtttgggggatgggcaggggagcttttggtaccaaatgaaaacactgctctgactgcagaggagaaaacgacttggaggaggacaaagtaagcagatgtgggggaaatagaaagctgcttcaattgcacgaagaagaaattatagtattgggactagaacagaagtgatgaagatagggagactgaaatggattcaagacatatttaggaggtcaagtagacagacctctgtaacgaattattcatgagggccagttagagggaagagccgagaaggacacccaggtttctggcatgggcaacaggacggatggatggtggtgccactgggaatcttgaatgcaggaagatgatacgtttggttttggacatgtttacattgttgtggctttgacacatgcaagaatattgagcaggccatcgggataaccaaatctcagatctacagaagaggccttggttagacatacacagtggggatatcagtggcatatggatgataacagaagcctgggagggggcgagattgcctagggagggtcaaatgagaaggaaaggctgagcaggagacaaagcctgtgaaaacgtaacatctgatgggcaggagaagggggatgagcctgtccaggatgttgaaagagagaggctggagaggcagtagaagatccggagagcaaagggcggcagaagccacgtgaggaggatatttcaggaagagcaagtggttaacgctgtcagaaaatgctaaaagagaaaactgccgcaaactgaacaatatgcattggattcaaacatggtggtcaaagctgaggggtaaagagggagccagtgaggtggtttgagaagtgtttgaggtgaggaggtgggaagtcaatatagaaaagtttctcaagcatctgaccccgaagataggggagaaggcaaaagttagcaagggatatggggttgggtgagttctgaaagccgtgagcatccgaccatgtttaaacatggctgagaaaggctctgtttgagtgggtgtggctccatctacaggtaggggaggaggtgatcaactatttaaggttctggagagatgggtgaggctgggagaaggaagtttggcttaaaaatttaaaaactttctactaaaacaaaaaaagatacttataactaaaatgtcttcatcatgaaagataaaagcaggatctgtgatcctgagcatgccctctggtgagttgacaagtcttgggaaagcttatgtgatattattgctctgtgtagctgaaacataaacatctatgtcaatggactttatgattctagtaaaaacagacagacctccaagttttgagtatgataactgaacaatatagagctatgggtggtgggggggacagcttaacaaaagacttaggatctttttgatggacaacaggcatatagttgggcaattttcatggatctatgggctccagtcctagtatgtttaccactggtgttaaaggcaggtattgtgcttttgagaagacaaaagctcctaggaaactctgtctacattgtttctgtagcagtcaagtggaaaaaacagtagaggcaaaccctctatgatggtctcatcttaattacctagcccttcatgaaaccaggagctcagggaagccaccctgtggacaggaaacagactggccatcagaccaagacactcagagccaagggacctggtaagagtgagtgcagtggtttcagagctcctgttgtgggcaaactcactggtctggccctgcctctacccttgctcctggaaaaggaagaatgcctttagctgggccctgaagaatgggcaaggggtgggtagctggaggggccagggagttgctgcacgggagtcggaccaatgtgtgtcagggtctctatctgttgtttgcaaacaagctctggactaaggtgataccacccagatgtggacacctgaggaaaagctaaatttgtcatcctgtgcaaactattggtctcccacaatcccctgtgaccccttaggtctctagacctccctttgccacacatttgcatctgggcaattatccaggaaggtgaaagtgaatagaaaggtctcctgaaggcagagggttactagagagaaagaagtttagacctaaaaacagaaatatcaatcgacccagcagtcccattactgggtacatacccagaggaatataaatttttctgttacaaagacacatgcatgtgtaggttcattgcagcactattcacaatagcaaagacatgaaatcaacctaaatgcctatcaattgtggattggataaagaaaatgtggtacatatacaccatggaatactatgcagccataaaaaagaatgagatcatgttctttgcaggaacatggatggagctggagggcattatcctcagcaaactcatgcagaaacacaaaaccaaataccacatgttctcacttaaaagtgggagctaaattatgagaactcatgaacacatagaggggaacaacacacactggggcctggtggagggcagagggtggaggagggagaggatcaggaaaaataaccaatgggtgttaggcttaatacctggctaataaaataagctgtataaaaaatccccatgacgcaagtttacctatacaacaaacctgcacatgtacccctgaacttaaaataaaagttaaaaaaaggagaacttttactgatttgtcaaagcatataatgccatataatacctattaaaacaacttttggttccccaaaccgagatttgcctctgtggtataagatgcatgtgtctaaggcttgatttagtaactgggtaatttacttgttggaaggaaatagaacgtgtaaacctctccccccgacatatttttaggtctatgaatctgactgatatttcagaagtatagagaaactggagaaattaaactaaaaattaaacacagcttacgcctggcctagctatagttcacttttattgccttttcataattgtttacgttctcattaattttgcacctcgggagccacatttgatcaatttgcagagtgataaaatatcgccattctctgaggaccagtttgtaccctgctttgttaatagcctgtcaaaaggaaatgccttgagcgtgttttaaattcttcttaaagttaagggagactggcgaaacaatagccggacttcctgccctccctcctcacctccgcatcctttctaaaagattccaaggtgcccttctcatggggaggagggctgatgagcaagggaagaagaaaggagagcatcactggttgcaagaaaacaggtgggttttttttttttttttttgtgaaaaaacagactttaaagaattttgaaccaaaagcaatagattttttaaaacaaggctgggtatggtggctcaaactcgtaatcccagcaatttgggaggctgaggcaggaggatcatttgaggccagagttagagaccagcctgggcgacataaagagaccttgtctctacataaaataaaacaaatttagctgggtgtggtcccagctactcaggaggggaggctgaatagggaggattgcttgaaccccagaggtcgaggctgtggtgagccatgattgcactactgcactccagcctaggcaatacagcaagactctgtctttaaaaacaaacaaataaaaacaaataaacaaaaaaaccaaacaagctccttacagagtgactcacaaatccagcaccaggaagatgataaaatagagacatatttatcgaagcaaccacatcttctcgtgggtcatctaatgaaggcagtcttaaattgaaatagtgggcaaatttggaaaagtaaatgtagtttgcatcctccatgtttgtgaaggtctgtggatcttggtggcagtgaagtgtttgaaccatgtttaatagggaagttttgtcccagaggttctaagccattctgcctaggctgctctggggctgcggtgaccctggaacgggtgagcacccagtggtatcccaggtaccagtgttcctttggtggtagctactagactagaaaatattacttgtagagtcacgtagcagccttttccagagcttcttcataaatctgattcatttttactattagagctgtctcaagaggtccagagtccagtgcacagcctctcttgtgatctgctggaagtccctcacttcttcggacttaacagtgaacagttaataaaacgggggtaaaaatccacttatgactctgttaaggactctcaccctttcttcacacttggaatctttcctgacttgtggaaaatttggtttggtttatagaatgtgagacaagccttctgaattcgtacatcctcgtaaatgtatgcgtaatacatttagaagtcagagagtctccttcagtccaagtctagttttgaagtatttatttcaagtgtatatatcaacggatctctacattcctacattaactggggtaatgtaacctaggagagtttagcatttcaaatattttttatatatatttcataagaaatattttcaggaacaaatgaaaacttggtgtggcaaaataaacccccaccacgctacatcccttggctcacaaatcaccaccatgtgcccaagttctgtcctgtgaaattctagtaataacaggattatctcatcaatttatattcacacctgtagcttgttattatcccggggtgacatgagatccttgtagcttaatcatttatttggctcaggcttttaaagacgagcgggagctgagtaacagcactgtgtgcctctctgggctaatctctgtcatctcaacacactgttttccctctagggagggttggcatgttccagttccagcagccggtgtgccgggcgatgttcagcagagccagagagcaggaacagcaggtaccagaatcctgggtcacggtgcagtttcagttagttttttaaattatttttatttttttttttgagacggagttggctctgtcgcccaggctggagtgcagtggtgcgatctcggctcactgcaagctccgcctcccgggttcacggcattctcctgcctcagcctccccagtagctgggactacaggcgcctgccaccacgcccggctaatttgttgtacttttttagtagagacggggtttcacacgtgttagccaagactgtctccatctcctgacctcgtgatccgcccacctcagcctcccaaagtgctgggattacaggcctgagccaccgtgcctggccaagtttcagttagtttagtttcaacagcagctcttccaaggtggtggaaatagactgtgtgtagggatcagagcgacggggagggatggagccctttcatctgtcctattttgaggaagacaagtcatgtattaaatgaagtaatacatgaggatatagcacagggcagaacatgtaacatgttcttcatgacatcacttattatgcatgggctattattggtatccttattataacttgaaggggctgacttaattcttactttttagctcatttctttggatccatgaggttttttggtcttacttctaagagtgtcctattagacataaagacttggccgacagatgtgtgtatgagtagggtcgggatggaggggaagctgtattttgtgtctatgtcagaaacggcttagttctgggttagtgtcttaaccatgtcttttattttctgtattctgatcctttgacatctgaggctgtgctgacccaattgccagagaccagtaaacaacatttgcccatggaatcacttttcagatgcaaaccaatggctccagggtccatacccccaatcacttctctcatgaagctctctcactccaggccatgatccactcaccttaatcccccccagagttaggcctcaaacattagggacagtctccatgctccagagtctgctgaaatgatccaaactagcccatcctaagcctgctgaccagcatcatccattccttctcatggaaaccatgataaggggtcttgcccacagcttccctcccttgttccctcctggctgacagggtgcttcctcatgtggaacacctctgccccccaatgacatggtgtggccccgactttgggaactgtgagtaacaaacacctcagcagagctttgtggcagcagaggcagcatctataccttggtttatgttgatattgcgtggaaaatggcactgctaacactgattgcatttcctggacctcaagttgggacaagcagtctgagctggcagaatgtgtcagaagtcatgcctgtgatccgtgactgttctgaggctgcaggaagcctttccagcctgggttagccaggagtgagctgggctgctgctaccactgaccctcatcagacagcccagggagggggacatcaggctgaagcacagctggtaggggtggcatttctgagcatgcaggtgtaaaacgggggaggaatctacaggggaggaggctgtgcccctgagggcataggctgcaatcactgaggccagggagctctgtctacagagctgtgggccgtggaggggaggaagtcttgcaagtagctgggccttgtcactcaaaccttcatgaatggcacctgctggctgaactcttggacttctcggaaagatgatggggaaagctgtggtctgtaaggtttacctttcctctggggaatgctactggcacacgttatagacatcaacattttagctgctaaccctggagagctggtctgggatctccatgggatgtcatcttgctaatatttagagtgggggacaaaatccagaatagattatttcctttcctggatactttaatttcacttgtaaccaaattgccaataggtgcattttctcctaaccaaattgccaataggtgcaagtttaaaatgacttctcttggaatagacagtcttaattttattatgctgcttcttggagtgtggatgccacctgacaaaatgatgaaaattaaccttcttcctgctatttcttggggtcagtcatttgtccaatcacatcacactgaactcattactttgggtttttaaagttttttttaaaactgcagatatttaaatcaggtcacctacagaaagggagtttaggccaggcgcggtggctcatgcctgtaatcccagcacttcgggaggctaaggcgggcagatcacctgaggtcaggaattcgagacaagcctggccaacatggtgaaaccccgtctctaccaaaaatacaaaaattagctgggtgtggtggcgggtgcctgtaatcccaactactcgggaggctgaggcagaaggaatcacctgaacttcgaaggtggaggctgcagagtgctgagattgtgccattgcactccagcctgggtgacagagtgagactccatctcaaaaaaaaaaaaaaaaaaaaaagaaagaaaaagaaagggagtttataaatcactgtgcttttgctttccctcctcctcacttatcttacatttcctcaagctaaccatggcatgttgtgggagaggccgaggagttccgacccaaggaatcttgacctgagatttctaggagaaggaggtggtgctgcctctttcctctgaggccacctccagttgcactaattgttcaatgttgttccacagactcagaacacattataattgtatgcttctcaataggagttattaatgaacatagaatgagaaattgatgaaattttttttaagtcgaaaaagctctcagcagcaatcccatgacgaaacccaggagacagggctttctgtagtgggaggctgtgggcaggagagtttgtttgcaagaggctgtctgcggcaccaccgcgatgtagccagaccccgcatcacctttgctaggctgtgccttgctgacatttctgcaggtgctgcttccagatgaaccagcctgggttctgatctagccacattgataatgaatgttccttttgataccgaagcacaaaactgggagaagctgagcttcttcacttatttcctatctgtttgttctatgtctctaaataggtctgtctcgctctgtcgccctggctggagtgcagtggcgccatctcggctcactgcaaactccgcctcccaggttcacgccattctcctgcctcagcctccccaagtagctgggactacagacgcccgccaccacacccagctaattttttttttttttttgtatttttagtagagacggggcttcaccatgttagccaggatggtctccatctcctgaccttgtgattcacccacctcagcctcccaaagtgctgggattacaggtgtgaaccaccgcgcctggcctaattccagcatttaaaaacaatctgtccagtgtgtctgcattctagaaaagcagggcacaatgaatgtggctttgattctgcctggtccttagataatcctggccacacattaagcccaggtttagcgtctggcgccagttccctctgcccgcttccttgagctctctgctccagcaaggtggggtgggcagatagggttgttgtaggcttgggctttggcaataagctacctctggactgagtccgagttctgcctctcactctccacatgagttgtgacaagctccattactttcctgagcctcagtttccttgtgtgtgaaaaaggaataataatacctccaggttgttgtcaggtgcacatatggtaggtaccaggtgtgtagtgcgttataactgcctcgctgtgggctctcaacaaagacggcaactggatggccacagcctcctcactgtcctgcgtgtcattcccctgcctggactacgcttcctctccctctgtttattgaaattctatccagtggttttaggaggcctctctgagcatctcagccagctttccttcaagaatcctgcttcatctattgtctgaagcacctgctaggctcttcacactctgcttattgcttttcacttgacaatttttgaggtttcattcattacaattatcaaaagaattttggcataagtcttccttccccaactaggctgtcagtctctggcgtttagtaaatatgtatgctttgtctgtctttgtacatccaccctcatctcctaatcagataatctcaatgagatttgtatctcttgtataccataagctcgataaatacttgataatactcgatgacaactcaaaagttcaattctattgccactccttgaattataatagcacttactctgtgagacagttactatgttaattatcagaatgaatgaaactagaaacagaccttctcctcctaaaacttatcgaggctagggaaatgaaagacattgatcattgtataaaacttgtaatgagttttacaaaagaaaggtacagagagccacaggaccatttaagggcaggagcttggtgtcacttgggagtagggatggctttctcgatgtcacactacaggggggtggacagagaagggtatccctggactgaaggagcagtgactgtgttgtggggacagtcatacatgagataatgatatgaggtgaggctaaagaggagagcgggggcccacatgtaggcctgtcggccacatcaataaaccagccttccctctaaaagcagtaagaaggcattggagagtttggaggagatagataggatcctcctctctgtgttttgaaaagagcccttgagctgcagtgctcataggggactggggcagagcaagaatgaacaaaccgagagcaaggaggagccttcccagtggtctgggcaagggatgatggcgggtagattggagtggtcatgcagaggaagggagtggaaggattcaagacagagcggggaagggaaatagactgagcttgatgctgggttggaaatggggacagggaacatacaaattcccttgatgtcatctaggtttctggactgagcacctgggtggacagtggagctgtacaccaacatatggactcctggagaggactggattgagaaggagtgtgtgagtttagtttggacaggttaagtgatgcccaggctctaagaggagctgtcaaaggatggttggataaagtcttctggaactttagggacaagtctaacttgtccagcattgatggtgactagttcacatgtcaacttcaaccacagtctccatcctgcgggcttgtaaccttattttcaaccttactgacccactgattttactccatatctctttaggatgagtctttaggttagaggtaaatttgggagtcactggtgtacagtagctgatgttgtggaacgtcaatgagaattggagatagaatagagtgaggggggaaaagagattagttagactgaaccttgagaaaatgaaccaacattttcatggctggttacaggaggtggaggctgaacaacagcttgagtgaatagaggcagaagaaaaaccaggaagcttcaggtcataggagcccacggaggagagtggttccagaaagaaacagtggtcaacatcaaaaactgctggatggacaaaagaaatggaactagtgtattggatttaaagactaaagatcattgatgagctgggcaggggatgtttcagcagaacagtggggtcagaaacctgtgggagcctgttgagtagtgaatggcaaaaagaagaggaagaatggaagtatcaacaactcttttgaagaatttgcttgtcagggggcagaaagagccaaggttgatggagaattgtggaagcgaaggagggtttttgttttttttgttgttttgttttaatgggagagacttgacacaattacatacaaagaattcattgggaagagagaggtcaaatatttgggagaaagaggggattatttatagtgttttagggtgaggctattctggattgtccaggactaagaggtaccctgggacacaggacttttagtgctaaaactgggataactttggacaaactgggatgattggccactctagttgtcagataggcaagagaagatgggacttaaagcacaggagctggaattttctgcaggaagaggggcattttctcttttgcaatgggaggaaagaaaaggatggactcagatgtggaaaacactgcaggcttacttgaggaagctaggggattcctgtctgatgttttcaatttcctgagtaagtccatttgctgagagggaatgagtggagaaagtttgaaatgctctttgtggagcctgggagagcacattgaacagaaaaattactgggcagcgttgaaggtccctgtgaggttgggttgcatgaatttagaatgatgctcatctgcccgtgtgtgtgtgggattatttagcagagatcagcagctcaagtgcagctcacagaaggtcaatatttggctacttctagggctgacattttctccagtgatgcaacaacaacaacagcaacacaaaacaaaggagtaaaaagggaattaaggaactgtcaagaattttactgaattcatggactagagctggataaagaaagaagtgaagacaggaaacgataatgaatttggagtaaaatcagtgggtcagtaggttgaaaataaggttacaagcctgcaggatggagactgtggttgaagttgacacgtgaactagttgccatcaatgctggtggcgcaggtgtgtggtggcaaggggtgctggccaggctgcagaagcagatggggagatgtaaacatgcattctctttatgggaagttatgacaaaggaagggagggattaaaatactcaaggggggacgtagggtgaatgatgatggaagcaagctttctaactgtgcttaaaaaataaagcaaatgcatttaaatgctttagggaaattgctgttatcaactgccaatattaattccacagtgcatggtattacaggacttcagtcaatgtttgatacatttcataggctctctccatcctgtcttcaaccctgttgtaattctagtttggtattctgagcaaagtattagtttaattatcttgcctttcttattctctgatgtactatgttccattcttatcaggttgcacaaggtaagcatatttgacttgtcttagccagcaaaccactttccacagaaagttagagatgcattcttagttagggcaacctctagaaaaatggagtgaaatatgaaagacattactcaaagtgtgagagagtcccaccccaacagagactccaggaccctacggtggctcaagaaggagtgtggggaccctagaaagttctggaaccagcctggagagactcttaggtaggaattttataaaggctgcccttgggcaaccctcactgtctctcagaatccaagaaaaaaattccactttgtgggtttttttttttttttttttttggtgtgtgagcattagggatcatggacgtgcagcaccaggcacagtggctcgtttgttagttcatccacactttttcctttcattcattcactcatggaatcaggaagcaagcatctcttcagtctccatgtcctgtgatctaggtgaaggtgctggaacacagaaaatggacacccacacacctcagtagactcaacaaatggaagcgtctgtcagctcttctgctactttctgattggtcttctaccttcttgattcgacatctctctgctgtcttgacatttggtaaaaaaaaaaaaaatgttttggcatttcctaataactcttcccatattgctttcctccagtttactctcacagccccaaatacagcagttttaggagaaacagcaccagtcaggggtaggggccctgactcatgtgtccttgagtgtgtcaagagacccctctggccaccatgcagggcctgcccatgctgttccttgccattttaatgtctccgttgagcttctcaatggctcggtgaagcagcaggcaggggtggttcttgctacttccatttcactgatgagcaaatctatgagattaaatgactggtcccagggacagagcaaattcatggaagacctgggtgtcctggcatttgtggtggcctcctggcatctgcatcttcatcctgtctgcacagcccctggctgggtctggggatgcagctctctccctggctctgggtgaggagtgcatgaccagcctcagccaatcggcatggacatccccaaggccaatgggtaggcctgtggcccgagtcaatcactgtgattctcagaactcatgggagctatgggcaagtactacagctctttcccattaaacttgaacctgagaagatgtgagagagaggtggaccgagacagaggcagcacaaaggaagtggagcagggagatggaagaagagaaggtcctggtgacatcatttgagttcctgggtcaagctctatccaagctagtcctgccatggtcttagaatacactgccttcacactctagacatttgtgtgtgtgtgtgtgtgtgtgtgtgtgtgtgtgtgtgtgtgtgtgagagagagagagagagagagagagagagagagagagagagagagagagagagagagagagtgtaaccatgaagaggtaattgatacctagggcctctgagctcctccaccaacaccctccccagaagtggccagattacttttggagtaattgtatcataggcaaatcaaagctgaaattatttatgaagaagctgaatgaactcattgattgttctttacaagaatttcaacagactttttcttctaaggaagaagtaataccaggtcttatgtgggtttttatataggctgtgcacttgtgtgtgtgtgtatgtatttgagaaggtaggacataggaaggtagaatggacaaggggaatgatgtgaaaattctttgcaaagtgaaaagtcctatttaagtataaaattatcttcagttatgtttcagttggtagttggcttcttataatccagtgcttgactcagggaccttctctgattcttagtggtaaccagggagctctgtgtcagcatgactcccatgcatggggaagcatttttccccaaaggtcataactagaggccagccctggggcagaagaggagcaagacgaagccacggaggtcagggtttgcacttctgtttctgtatttggctgacatcattccatggacttgggtgtggaacttcccctatgtctctcttgctctctctctttttctctttcccacacacagccctgggaggatggcataggagagagcgtgtgacaccacatggccatggcccatgggggggccttcctggaccctcatggacttaggggttttgcatcaccatggtgctgccagacgtggcatgcacacgttacatcaatgataatgggacatggtgcctggactcagcgtgatgctgctgtgccctctccaaatgatacacccctgctccacaggctggcatcagctggccacaccccttctccctgctgagcagcacaggagatgctgactcctggctctagtgctttcatccaatcattgggggttcttcctgctgtgctcagggtccacagaatcttgacaagctcctcacacagaagacacaggcctggtctgtgcatgccagcttcagatccctcatgaatgctaaggggctgccttgatgtccccaccagctctcctctccctgctggggccttcccgggctgcagctgcagacccaggctgagtcaaagtggttggtttgtggggtagacgatgagctttagcatggtggccccccacccaggctcacatgtggtactctaacctctgaggtgggccgcatagcagcctcccttgcccgctcctctcccagcctccccatggctctgcagccctgcaggggtggtgcagctggagctggagcggctggggctggcatgggacacaagggcgattcttatctttgtcctttccccggcctgcctgagctggacggtggctggagatcagacccttggcttgccttctgtcagggacactgtcctcaaaacttgaggatggaagagaaattcacattctacgtggccaagcctcctgtctctcttctctggggaggggaggctgcttttgtttatgcttccttctctctgctggaagagactataatgagaggatattttcttgtcctttggcccaagaagttggcaccccagcgccagggtactcaatgatgcttgtgcttccttcccacccaaagaaaagttccaggggatgtcagtgatggcgctgtcctgttctgccattggaggtcctagaagatgcagagaggttgcttcttggagaggagggaggggacagggtgtcctgccctggtacccacatgggccttcctacacagggtgaggagtctgagaagccaaggggaccagtccacccagaacccctgcctcacccccagccggtccccaggtatctgggacctgggaactctctcctccaacggccctgatccaaggcctgtgctggctagagtcatggaagggtggctcagggctgcagagctggggatgggacttggggagctggttggggtgaacctacacacgtcaccaatgaccctcactggatgagacaggagataagggtgggagagaagaggcatgtcctgggggccccatttgtgctcttgttctggccctgaaaaccttaggggtgggtctggggtgaggctcagcagtgggagccctgggaaccttctctgccataaggacgggggattctgagacaggtgagggtctgcctagtgtgcccagaaaatagttcctgctcttccttagtagcacaagcactgaggctgcctgctcccagcttgacaggggttcactaggaccccttcctctcctctccctcctctcaaagagattggggactcagctgggatcgttgggtgcctgtaacaaaccagaggggtgcccctcactttctggactcagtgaaaatcagtcttctaattttgcccatatcattcctgatgaaaattcagttaagtgaggtcttagagaagaggtagtagagaaagtggtaatttctcataactgacccgcccaggccaccctctggtttagaaaagtccctgctccatgaagggaattttctgggggagacggcatctgagaaatcagtatttcacgacggtgtctttccagtgatggttctgcaagctggtagagtggtgagtcgggatttgaactcagatctttggccacccaggttttccttgccttgccttgcagggctggtcttaggcttcaagattcatttttgtagtttgtgggttttctcttaaaacgaggctcttattcctgcaaatatttacaggttactttattctgtgtggaacagaattgcttctaacctggtgggggcagggaacactgcagtaagggctcaattaactgatttcacagtggtcacgactcagacattcattttagagattaagtggaaaataaaagagatcagagcacctcaagcatacagcaggaacgcacagtgaattaaatggagagatggaagtatttggtccctgaagacgagcatgacattgcgatttagcttggatgagaaaactgaggtttcttggaaatgcctacccacgtgggggaatttctctgtcaagtttctgctgctttgcagccatttaaaatgggtcctgaaatatctgcagtgcagaacatctgagaagagcttttcatttgctagaatgttgcagcaagcaggctaagcgatgttagcaggcaactttgtgatagatttagaaagccccgaagaaatgggtggtggtgatacagagagattttttctttcctttttttccttttttggcttgtctgcagaatagatgaaaagagaaaatatacccagatactttgctcactctcccaagtgcacactaggcaatgtaagctccagaggcagcgcttacaggaggggaagggacgctgaggccaagagtgctggctcactggggtggaagggacttcagagggcgttcctcactcctcttattgcaggtgaagaaacagaggcagtggtcctttgccccaggccattcagctggccagtagcggagcccagggctacccagatcctccaatgcccaggctggtcctctttcctttctgaccccaacacatgaagagtccatctggaaatgttggctcccacacttcaaaacattaaactccttgttctctttctccaaatgattaatttgttttcagtgtttacattagctggaagccaagttgggaacactcctaactcgtttctcaaacaagatgtttttaaaatgaagtttcccagcatggaatgctttgctactttgtaagggcttcagttgctaagaacttactgcacctgtgtcaaaactgtgctctcagggcccctggtggagtccagaagaagagttccacgcagtccctgtttttcttttttttccaggaactcctggaaactgaatcacagatcagatcatgttgttccacaagaacgatgtgtcactgtgaggctgcattcctgaccacgaactgagcaccaaataagtcatggacatgcaccaaaaggtgtgacccaagggaggcagggtgagccccatgtctcagaacatcctcgcggacagcaaagcccttgatgtggtggagtaggggcctgtggcaacccctcacacatggcaggtcctttgcaaccccaagtgcttcagatgctaccagccctccttgggcaggtctgagatgtgacagagaagaagatgagaatggaaaaagagaaagaagagcggaaaactaaaagagggaagggcagaggaaagagcagaaatgcagtctagctggagggcaggctgctggctccagccactgcctcagatccccccgacctggggtactcaggagtctgagtgggtacagggctatagcctcaatttccccatctgatgtgggacttgccttgacccaatgcctggaccacaatcatccctgatacctgaagcctccatagatatgactctttctaacgtttgctgcttcaggattcaaccttgtccacttttggcttcttcatgccctctccaatgagcagtgattcaaaaccttttataaaactacccatcactatcatctctggcaacatggctgtctagagaactcagaaaactgtctccctctgtaatgtttaaaatgctggctatatttcagaaatgtagatggctgcacatgacaaagttaaaaagaaagggaagtgttcagaggtcaaaagaggatgccaaagtccagagagctgcaggaatgctggagggaggctgccctggggcaggtgctaaccccatgacctcaggtggctttggtgtgcccacttcctggggacttggcacagcagcttgggtgagactcacgtgcagagctcactgtccaggcagctttcccaagaggcacctgcctgggcacacacctacactctcttccttttttctttcacaactggtcccctccaacttgaccaagaaaggccatgttttaccaggattcctgccacagggtgcaaggccctagacaaaggggcgagagataagaaatatcagtgctgttggacacccttctaatagtggcatcatgtgccccaggctggcttcggggctctccttctctcccatgctctaccctgaatgggaagcactggtcgtggggtgttctggcccagctgtgaggttctgaattcatttgagttgtagagtgggctagcacatgggatgctgattttcctttaatgaccttgccccttccattccctactatggccacagaatgcattgttcccataaggaccaaacaaagacttgtagacgatggtagctcatgtcacccaggcagcaaacacacacctcactggcgtacctgtgttagaaataatttgggatggggagaaggcgtgctgggactctccatgaggttcagagcatgctgctgtcatgctcaccaccagggctggagggagcttgttggagagcacgcttactgcgggccaggcactgcaccagagggcacccgtttggccttaattgacaccgctaatcttggtaaggcctgtctcccatcggtgtccccgtctgtgccttggttggatcatttgcatgattttaaggttgagaaagtgaaaatgtgcacacctaagcagattgatggaacatctctgacagaaagtcacataggatagaggtaagatagtgtcttagtttcttcaacatttacagggaaaacactttcatgatcttttggccaaaatacaattgaatattgtaaatccatattcaactttttttgcaagggtctattgaaattcatactatctctatgtttctgaaattttcacaggatatcaggctaaaagaggcttttctaactatgagtaacagattaatagttatttgataactgttgataagaccccctccccactcccaccttttggtataattccttgaaagtgagaatgtgactgtctataatgactagtaacaaatgactagtaacttttgtaagataggtgggttctaattatttgcttttaacaaaacggaaacagcttatgggtaatttaaaataactttccatgattaatcagcacgtgatttttaataacaaatgactccaaaggggttcatagaacagagtgatgtgctacatcaatactcatttcttcccttttctgtaattttgagaataatgttcataagtgcatatatctaaactaataaagattggaacagaagtaatgctgaatcctgccttagactaccagtaagtcatattaatctatagctacatgtaaaaaaattagaagctccacccatttccttaagagacatagttttttttttttttttttttttttttgagactggagtctctctctgtcgcccaggctggagtgcagtggcgcgatctcgctcactgcaagctccgcctcccaggttcacgccattctcctgcctcagcctcttgagtagctgggtctacaggcgccggccaccatgccccgctaattttttctatttttttttttagtacagacggggtttcaccgtgttagttgggatggtctcgatctcctgacctcgtgatctgcctgcctcggcctcccaaagtgctgagattacaggcttgagccactgcgcccagcctaagagacataattctaataaaattttactatttgtacttaaaaattatttaccaaaacttaatatatttatgttttgatcatttgcgttctgcttatgttataataactatctagaagaaaacaatttaatccttgcagtcttgtgatcagagaaaattttatttatttttatttttatattttaagttccaggatacatgtgcaggatgtacaggtttgttacataggtaaatgtgtgccatggtggtttgctgcatctatcaacccatcacctaggtactaagcccagcaagcattaactgtttttcttgatgctctccctccccatccccatccctgacaggcctgagtgtgtgttgttcccctcgctctgtccatgtgttctcattgttcagcttccacttataagtgagaacatgtggtgcttggttttctgttcctgtgttggtttgctaaggataatggcttccattattccagcttcatccatgtccctgcaaaggacatgatctcattcctttttatggctgtatagtattccatggtgtatatgtaccacatttgctttatccagtctatcattgtgggcatttgggttgattctatgtctttgttatgtgaatagtgctgcaatgaacatatgcatgcatgtatctttgtaatagaatgatttatattcctttaggtatatacccagtaatgcgattgctgggtcatatgatatttctggttctaggtctttgaggaatcgtcagactgtcttccacaatgattaactaatttacattcccaccaacagtgtaaaaacattcctatttctccacatcctcgccagcatctgttatttcttgacttttttataatcaccattctgactggcgtgagatggtatctcattgtggttttggatttgcatttcttgaatgaccagtgatgttgagttcttttctcgtatgttcatcagccacataaatgtcttcttttgagaagtgtcttttcatgtcctttgcccactttttaatgaggtggtttgtttttgataagatttttaatattttaaattttgtatacatattcttgttgcagagaggtctgagagggtgattaaaaaatacttggaagcaaaaaaaatttaatatattaggataaaattctgtaggtgagatgaaatggaaataaaagttcaaggaagaaaaggatactctaaaactccagatgtttaaagaaaggcttgacttgtgtttttttagtggacgatgatgggtattgaattgttgtaaatttatattccatgggatctatttacatgagttctgtaattgtttatgtcagtatttacagtatgctagaaaaaacatcttttataattatttaagcttataataaaaattctggatgtcaaattaaaaatatgtgagaggcctaatagttttcccaaatgtttaaggagtatgtgagcaaaaaagttgaagaccactgtcttagagcactcagctaattctctagttaaaagacaaagagagtttcatgaaacaaaaaaaaaaaatccagctacatactgtttacaagaggcactccccaaacaaaagggcatagaaaagttgaagctaaaataataggaagggatatatcaaacaaatattaatcaaaaagaacagtggtatagctatactaatatgggacaacatggatgaaggcaaaaggtattgcaagagatgaaagggtcaccataatgatgaaagattctactcaccaggagaagaatactgattatatacatctaataatacagtttcacagtagaaaaaaccaagagtacaagatgaaatggacacagtcaccatcataatgacagctctatcagtaattgaaaaattaaattaatagacaaaaatcagtaagaatatacgcatacctatgaagaacacaattagcaagcttagcctcatgaacacatgacaaacactgcatcccacagctggccttgcattctttttaagcacctacagaacactggatatttaccatgtacaacgttagcaagtaagtctttataagtcccaaagaaactatcattcagttcacattatccaattattatgaaattaattaagaagtcagtagcaaagaagactaataaaacaccatacttttggaaataaaataaagttgaatctaaataatttatcagttaataatccaacatcataggaattagctcttagaattgaacaatagaataaaaaactacatataaaaagttttggggtaaaactgactcttggaaaatgaaccctaaattacattagaaaaaaagaagaaagaaaaataatgagcgaaacacccactttaagaaattagagagaaaaagtaacagaattcagccagagaaaaagaaataaagagacaataaagatgacagcagaaagtaaccaaatagaaaacaactgtgcaatgggaagaattaaagttgattctttggaggtaagtgaaattgaccaatccctgatgagattaatacagtaaaaaaatatataatttaaatacacaatatctgaaattaaaaagtgtgcataacaaaagatgcagtaaaaatattttaagaaatatcatgaattcataccagcaaattggaaactttatatgaaataaacaaagatctaaaaaatattacttacaaaaactgactcagttacaaatagaaaaacttgaatagtcctataactattaaagaaatgaaatcagtagttaaaagagttcatagaaagaaaatgctagatggtgttttactctgagttttcccaaacatttaaggaatagataattccaacgttatggagattggaaaaagaaagaatattccttttttttttttttttttttttgagatggagtctcgctttgttgcccaggctgaagtgcagtggcgcaatcttggctcactgcaagctctgcctcccggttcacaccattctcctgcctcagcctcccgagtaactggaactacaggtgcctgccaccgcgcccggctaattttttgtattttttagtagagacggggtttcaccgtgttagccaggatggtctcgatctcctgaccttgggatccgcctgcctcagcctcccaaagtgctgggattacagacatgagccaccacgcctggcaagaatattccttttaagccttggtttagtcatttgccaaatgggtcaacaatggcacaaatctcactggatccctgtgaagattaaagcagataatgaatagaagtatcttgcagcaagcaagagaaaggttcactggcacataggatgcattaaataaacagtaactattattatcattatttatgattattgatggttcccaagagagcctccctggcaaggcaggccatggtgccagtcgtctgtataagtccatgcgatcattgaaagcattatttctccaggaatgaggtagtcattgttctctggttttacaataaacatttagcaattggcaggatgtggacgaacctcatgggaatcggaagtagctctgaattgtaaagagaaacagccagatcagataggaaagtaatttttaattactccgctgaatttctagcagggagattgcaaccttggtgagtgagtctccatgctggtatgaggtagagctggatttggacagctcaatgcaggtgtgccaacctttccttcctctctcagtggacaaggaagggaggaacaagactaaaatacagttttaggtcgaccaagtgtctgctcgctgacatcattcatccctccctcaagtatcacagacaatttttgtagccgagcgttgctgctgtttagtaattcaaagtgtatctgagaaacacaattatctcgacagagagttggacagcagctgagggtgatgtgtgagctggtgccagaggtttgcttgtttagttactccaagcagggagttgtcataaggcttcctggaggagtggagctgggggcagagagtggcctctcactggatgcaggtagaaaaaggagccagaaatgagcaggcccagctagttgctggattggctagttgctaccatgatgtcatttcatacccacagccaccctgaaacctgaaagcaaggttttatcacttcccatgttgcaggttagaagacatggcttgcacaggtggagtgatccttcccaaaccacagaagcgggagtgaagggatcctatccttgggcagaggctcagaggggagaagatgggtacacaggcagagatctgggaatggcaaggtcagcttctagtggcccaagaacccctagttctggcttcctgttgagtaggaccaagtcctcactccccttcccctgggattcctcaggctgacctgaggctgagctgactctcacggtttggactgggtgacttggctcaggggctcctgtgggatgagcaccatgagctgctccgaggtgccaggacatccaaccccaacccttgctggctgtgctgtctcagcaagtcaccttgcctctctgagatgcaatttcccaatctgtaaaatggggatacaatgctagtacatcgttcattgttttccctttaaaaattaaatgaggtacccggccgccaccccgtctgggaagtgaggagtgcctctgcctggccactgtgcaatcttccaagtgtaaagtgacagcctttctgcaggtgtacccaacagctctgaagagacagtgaccatcgagaacgggccatgatgacgatggcagttttgtcgaaaagaaaggggaaatgtggggaaaagaaagagagatcagattgttactgtgtctgtgtagaaagaagtagacataggagactccattttgttctgtactaagaaaaattcttctgccttgggatgctgttaatctataaccttacccccaaccccgtgctctctgaaacatgtgctgtgtcaactcagggttaaatggattaagggcggtgcaagatgtgctttgttaaacagatgcttgaaggcagcatactcgttaagagtcatcaccactccctaatctcaagtacccagggacacaaacactgtggaaggccgcagggaccactggctaggaaaaccggagacctttgttcacctgtttatctgctgaccttctctccactattatcctatgaccctgccacatccccctctccgagaaacacccaagaatgagcaataaatactaaaaaaaaaaaaaaaaaaaaaaaaaaaaaattaaatgaggcaacgcaggcaaagtgtccagacccaaactggatatgtaacaagggccgatgagtgtgagttccttttgttccctcttcatatatccaggccagggttccacattttgaattggagaattctctactgtggggggcgtttagcaacacctttccctcatcacataggacctcttgtaacaagcccatcctgtctggaccagggggattcagctaagcctagggtcagtccaaataattccaggacttggaatgactcaataggacatcaggggtagtaggcgccggggtagcgggagctggggtagaggacgctggggtagtgggcgccggggtagcggggtccggggtagcgggcgccggggtagcaggctccagggtagtgggtgctggggtagcaggagccagggtagcggggtctggggtagcaggcaccggggtagcaggtccagggtagcaggcgccgggtagcaggtccggggtagcgggctccggggtcggcactgcagggtgtttagcagcattctctgcctctgatcacagggtgccagtagcagagtcctctcaccccattgtgacatccaaaatgcctccatatattgccctctgtctcccgggggacaaaacttgcccttgactgagaaccactgtcctaggtccatctcgtgcagttgggccagagcctacctcgactctgggcacagagaagcaagtgccactcctggagtggtgtcctcctccaggaggcatgccagagctccttggagcttcttaaaagcgcaggggcctgggctttactccacaattctgatgtcattggatgcagtggacatttgctgaaagctcacgccatggtctgatcagtgggcgcagctgagaaccactggtgcctggctcccttggggacggagcccacagccccagggcctcagctcgggtgtgtggggcagttctgtgcatgctgaaagcataccccctccagtgcttgatgggggcttctctggtcttctgcctcagagccctctccaaaacccatagaggccttcagacccatgttcagccccacgtgaggagttggaggagtgctagtgccccaggggtaatgggagcctgtaggagctccccagaactgcctcaagggaaaccacagatggcgccttaaataacacagttctctctccttggcttacagatgccctctcctccctgggtcctcacagggtcacccctctgtgtgtgtctgtgtctgtgtcctaatctcctattcttataaggacaccagttaggttggatgagggcccaccctaatggcctcgtttaccttaatcacttctttaaaggccctacctccaaatacagccacatgctgaggtatggggggttaggacttcaacataggcagattgggagatacacctcggcccacagcagcatccggaggcctgtgtcttcctgtctgagcctgggtgtggatgccgcacccgtgctggttggaggaagctggcctgcacggcctctgagcttctccactttcttactcatctgaactttggggcactccaattctgctgaggaaggagaaggatcctttttgcaaattatatactgactctagtataacatcacatgacaggtaaaggaggatatcaaaatattttatcccaaaataggtttctttgctatactttgaaatggtgctgcaaagctggctttcgtgatgcaaaatttgcatctgtaaggaatctctaataatataactaggtatttccccttccaggccctcccaatccagaagagattagcacctttaaaagatctaaataggaaacattgccatctattgtctcaaagggcagctacctatgagacttcatctacataacaagaaccctggtctccacaaccccttatcttaacccaaacactcctttctattgattctaggtctttagataataacttaactcttcaaccaattgccaatcagaaaatctttgaatccacctatgacctgtaaggcacccccccaccttccagttgtcctgcctttccagaactaaacaatttatacctcacatgtattgattgaggtcttatgtctccctaaaacgtatatgaccaagccgtaacccagtcaccttgggcacatgttctccggacttcttgagactgtgctttgggccctggtcattcatatttggctcagaataaacctctttaagtagtttacagagtttgcctttttttgctgacatactacaaattcaaagctcaatgaaaacaaaacagggaagcctcaaagaaatctctgcttgatgccaatcagttctttgtatctttagggagatggtaggtggtgttggggagcatgaagtctgtgtgtgttgtgtgtgtgtgtgtgtgtgtgtgtgaatgtgcatatgcatctctgctataatgcagggataaaaacaacaatgctttggacattttcatgatgctgaatctactgtttggagcttacaataaggaaatatgcagagactctgaaatgtcttcacagaattgtagctggaataacatggttaagatggatattcaaaatatttgaaaataatttgaaaatattttctcccattctgtatgttgtctttcactttcatgataatgtatttcaatgcatacaagttttttattttgatgaagttatatttatatttttcttttgttgcctgtacttgtggtgtcacagctaagaatccattgatgaatccgaagtcatgaagatttacccctgtgttttcttctaaagagtcttacagcttttgctcctctatttaggtcttgatgcattttgagtttatttttgcaaatgtatgaggtagagtttcaactaattcttttgcatgtatatatctagttgtcccagcaccatttgttgaaaagaggattctttcccattaaatgatcttagtgtcctcatgaaagtcaattattctaaggtgtgcaggtttatttctggactctaaattctattccactggtttagatgtccatccttatgccttatattcagtcactgctttaattactatagttttatagtaagttttgaaatgaggaagtgtgaatcttctaattttgttctttttcagcattgttttggccatttggggacccttgcatttccatatgaacttgaggattgggctttttagttctgcaaaatggccattggaattttggcagggataacattaaatctgcagatcactttgggtagtactgccatcttaataatattaagcctgggctgagtgcagtggctcacacctgtaatctcagcactttgggaggctgaggtgtgcagataacttgagctcaggagtttgaaaccagccggggcaacgtggtgaaaccatgtctctcctaaaaatacaaaagttagctgggcatggtggtgcatgcttgtagtcccagctacttggagggctgaggtgggagaattacttgagcctgggaggcagaggctgcagtcacccaagatcgtgccactgcactccagcctgggtgacagaataagaccctgtctcaaaaagacaaaacaaaacaaagcaaaaataatattaagccctccaacctataagcacaggatgttattccatttatttagatattctttcatttctttcagcaggaccttatgattttcagtatatgagttttcacttccttggtttgaacttaggtattttatttcattttttggatgctattgtcaatgggcctgttttcttaatttcctttttgaattgtccattgctagtgtattgtgatattgtgaaatatatatttggcctttatcccatttcctgatacatagctcctaaaaccactagaatctctggagtgttaagaatgtcttttgtttgctactgagatgactggcagctgcagacctctagatagcttccgggtgggggctggccacctgaaagaccatggcatgattagaaggttgagactttcggtcccacccccaacctccagggaagggaagggggttgaaggttcagttgatcaccaatggccaatgatatcattactcatgcctacataatgaagcttccatagaaaagcaaaaggactgagttctgggggcttctggaaagctgaacacatggatgttcctggaaggggttaacccagggagggcgtgcccctcttcttgcctcttctcccacactttgccctgtacccttcttccttctggctgctcatctgtacccttaattatatcctttataataaatgggtaggtgtaagtagagtggttccctgagttctgtgaactgctttcgcaaattaattgaatcccaggatggggttgcgggaactcccaatttacagccagttggtcagaagcacaggccacaacctgtgcttgcgactggcatctgccggggtggggcaggcttgtggggctgagccctcaccctgtgggatctgacactgcctgcaggtagacagtgtcagagctgaactgaattagggaacacacaggggtgtccactggagaatgacctgcagcactggttgttgttggagaaaccccaacagccctctggagtcatggaagtgttatctgttgtaagagtatagtacgagatgcggagtttgtttcttcctaggtccttatgtatagaaattcaacatttttttttgtgttgatcttgtactctacaacttttctgaatttgtttattggctctcgtagtatttttgtggattctttggggttttctctgtataagatcatgttatctttgaatagaactagttttacttctttccaattggaatactttctgtttcttttttttacttaattgctctggagggaattgtgtcttgacccattctctacctgtagtctaggagggattgaccccatctcttaagggtgatccctgcttggcttaagcaagtccatagagctcatctgcttgtccccagtgattgggtcggaaatggcatatgacctccttaaggacaatgagatgcaaagaaatatagctttagcttctaggaaggaagcttctcttttctgtggaagcttctggaagagatcctgactcttctgcttgtgagaagttggggcctgaaatgtggtggacacttctgctaccatgaaagaagtagtctaaggatgacggtgatgcagaaggaagggaaagcaggagacctggagaaaaggagctgggtctgggggtcatctcagcgcctaggaaccggcagcatcggaagtcctctccccctgggtttttggttgtatgagctaagacatcctcaatttttttttcttttttcataagtcagtttgggttctctgacatctctttttacttgaaaatgttaaagttcaagatacatggtatatccttagcttagtataaacttatcagctatggttgtttcacttggactttttacctaatcaaaaaggaaataaagatgtaatacacatgtaaggagatggtaggtttttctctctttctctttttctcccttccccttcccttcccttcctttctctttctttcttctctctctctctgttttcttgagataggatctggctatgtggctaaggtgggagtgcagtggtaccatcacagcttactgcagcctcgaactcctgggctaaagtggtcctcctgtctcagcctcccaagtagctgggactacaggtgcatgctgctgtgccctgttaattattttattttttgtagagacagagtcttgctacattgtccaggccagatttttcttttaagtgtggtaaatgctataaaagtctcctttttacattattctcaaaacgtttttaatgagcaataatattcattattgaatgcaaaatgagagagagaaaacaaaggaggagaagaagaattgagaggagacggggacaggtaagacagcatgagggaaagaggagtggtggaaatggagcagaggctggaggaagagggttgggacctgaaccatctctagggctatggccgataggcccaggggcagcctgctggagctagggaagtgggtggttgtccatcagctttcctgggtggtcccattactgggaggcttccatctccagctggactgtcctgcagcttcctttggctgggctgcccctgtcccctccccctcttccagtcctgtttctttccaggagccggctccttggagctcatccatcctccttcctggggctccaggcttccttttctcagggataggatttgtctctcagcttcagaaatgagggtgcatctcagagcagcacttttcctggcccagtggctgggctcacttgtgtctgtgttgtgtccaactcactcatcacacacctgttgtggataggacacaacacagggacacagggatgagacagaaatgaggacacaggcactgacatgcataaccagcagacagatgggtatgtttaattttagaggtgtgttcagagttagagggggacagggaagggagggattctctaggcaggactgaagcagggaagtctttacaaaagatgtgctgggctttgaaggatgagtaggagttgatcaggcaaaccagtggaggaaagaaggggaaggggctctcattggggctcatcctggctgcacatcggagacacctggaggagccttgggagagaagatggccaaagagcagggagagctgatgctgttccctcagggtttacctgtttgcttccatgctgtgactttgagccctgtgatttcccttagtgatgacagcatatcccaaccatgtgaagtctaactgccctctagccagtgtaaacaggctattctggagtgtggggccaggggagaaccttcagatccctgaaatatgccccagatatggtttgcggaactcaacggcatctttttcaccttcaacccaacctgtccccaatgtcagctctcagctgagttactgcagcaaacctttccccagttactggctgctatctgcacattgtgtgaccaactaatctctgtttgcctgggacttacccacatttagcattgaatgtcccacatcccggaaatccctcagtcccaagcaaatgaggacagttggtcatctacagctcacacgccaaccacagccatcctttcaaaatgcatgtaatgtcatgccactctttgctcgacaccctccagggctcccctctcagagcaaaagccacacaaagctctccctggcctggtgcctgtgacctcactcgcctcctctctgcccactcccctcctcacccactggctccgccgagtcaggcctccttgatgcttctccaagcttcctttcaccacagggcctttgcatgcaggtcctctctgcttggaacactctctccctgatacccacagggctcacacctcctctcacccaggatggatctagtattagctctgcagggacagcttccctgactcccctatacctcacgtacttcaccccctccagagccgtgattcctttcctttctgcacgtctcactccgacaggcttactttctggtttagtctttctctgctcacttggatgtaagcttggtttactcatgctgtgtcctgactacctagaacactgcagagcgcatagcatgagggcaataaacgacgaatgaataaatgaatgaatgaataatgaatgaatgattgaatgaaagaaatctggacaacttactcacttagggtggctaaggagaggtaagggctgcttttcccagacagcccaccctgcactgcccctgtccccaagccttccaggtggactcatgcagtcctgctcggagctcctctgctgctccgggtttgactcaatcgacacccttcgcaccactttctaagtgtctcctttggactgggcccttgagccatgagctttcttttatttaatgtgatattcccagcgtctggcaatgtagcaggggctccgttttgaactactggcctgtgcaaaaccaaaagtctttcctttaaggatctggagttaatatgatggctgcgtctcagagatgtaaaggccacacagatgagacctcagagaggaaggaatcaagttggcggggatttttccgcgagtggctgcattggctttaagaaactgcgccgggctgggcagccgacgcaccgctaggtggcgcacgcgctcgctgcgtctttcagggctgcaggtacggtgcgggtttctggtgcgctgaccgcgctggggatgagcaccactgtcatcgcggggaccctcgggctgcgcctctgcccctcggtccccagcacccctgggaggagctgctgcgatgacacccagtccctgggcgccgccgcatcgccctgccctgagcggaattctccggccccaggagaggccgtgtggccataaaagggctgacctcctgattcggactccgcaggtagtcactaggggctttcgctgctcctggaagcaatttcaaaccagcaagcaggctcttatagactcttacaccaaaagaagaatttggaggtccacccctaaacagtccatcactgttacattgactcccaaattcctatgctagagttaccttaacggcaagccagacccctgaccccaacccatgtcaatagcgggggtgggggtgggggtgggggtggggtgcgccgaccctgctgcgcttgtcagcttctctaactgtggcttggctcctctgtcctcatgtgagctctggaccagcaatacctgcacccttgccagcaggttgcaaatgcagaacccagacctcctgaatctgagcctgcattttaacagggtccgtgggagattcgtgggcaccacagaactgcaggagtgctggcggagggcagggctgagtgcggaaagggagatgggcaggcccatggcgtggggactgacctttggcacagggcacgtctgagtgcagaaagggaggtggcaagtctgtggcttggggactgacctttgggtcagcggtggagaggaagggtacaggggtcctttctccaggaggtggtcctggcatgggccaggtgtgagtcccgtgacctccagaagcacatggtaggacaggccgggcaggccaggtaggccctaagctccatctattagtgcaggagggaggccctgcactttgctcaccactgaactctgccgccagccaacaccaggcacctgatggatctatgttgggtgaagcaatgaagtggacagcccagtgccttgtggaagggacaccagggagtgctgaggcctgtgggtgggcgtatgaggtgcagggcagctggcattggcctgggggctgtgctcaaagacaaactccatccacttctggctgtgcacagggccagcttggggaggtagcaagtggatgagcaaaaccaggggaaagcaaggcaccagccagagctgtgttctcagcagggttgtgttggcccaagtggggacagcagccatgtctggagacatttttgattgtcaaactggagggggtgctactggcacttagaggtagaggccaggaatgctgcacacagcttgcaaggcgcaggatggcccctgcaacagagagtgacctggctccaaatgccaatagtgctgaggttgaggaaccacgagagaaagcagcaggctctgcaggcactggtggagatttctagtgccaatagctctatgtccccttccccacctccaccagtccccattgggacctgagaccttattaggagtgactacagtgctggtcccagttgactaggaagagggctcctggtcaggctgacgttgcactcaggagtctaactgtccagtggcagaaatcgataattggttccagttcctctccccaggtgccacgatgctggcagtgcccaccactctgctggccttggactgcaggactggtccctcctgtggcttgagacaagctccagctagtctgctgcagtgtgacagcctggggatggggagggagaggactccggtacacagcctgggagatggcttttccatggcaacagctcagttcctggtaggcagccctcacctgctctgatcctgccacatatgtgcagctccctgtgttccatccagagatcaacttggccaaaagaatttattttcagttttttggggaaaaccaataaaaacacctccaaatagccctgctttgccaggagtaccaaatccttgggtttgcagaaatactaacgagtgcttttatttgacctttcctttcttctcctttccctttctttcttcttcctccctttttgttgttgtttgtatttgaaatttatgctttatgtttcatatgagttcatcatgatggggctgttttccataacatttttctttagcaaatttcttcaaagtatgtgttaaaattatttttgtttgactattgcataagctccaagagatcagaaactgtttctctccatccatttatccattcattcaatccatccatccatccacttcctcacccatatacccacccacacaccaaaccatttgtccatccatccatccatccacccacctatccacccacccatccagtcatttcagtcatccatcagttcactcattcacccattcatcaacccattcatcaacacacccttctgttcactcattcatacagccagccaacaatccattcatccatccattaattcattcattggcaaaggcaagcatttggaattgctgctctttgcctagccctacaaaagttcttactgtcacagagatatttctctagtggaaggctagaaattcacaaaacaaagtgttaaatgcatttgagtgttatgcacaaaggccctatggggccaaacagaagccggctaacttggcgggtggtggtgtcagagaagatttcaaagaggatgggacctattaggagagccttgaaggataaatgcagggcagtggggtcagtaattatctagaagcgacagctagtgagtgattcgttgggctgctgaagtgaagatggggacatgagatgatactggtcaggtaaggtagcattgtaaaaggacttcaatgatgtccaaggaatttgcatgttatcctgtaatcctgtagacaataggagttatccatgaatgttatggtcggtgctgttttagagagaaacttctgggattgtatagagaggtggggatgctctcctaagtgtcttaactgattggtttgaaaactcttttctggggtcataggcttcttgcataattcccagaaatacccagaaagcctccatgataggcagtggtgcctggacctgcagctctgagggaaggagcctggaggagaggactacctgcactgagcaataacccattgatgaatggattgatgaatgtatgggtgggtggatggatggatgactggatgggtggacagatggatgaatggacaggtagatgaatgaatggatagatgggtggataaataaatagaaaagactacagagctttgtacatgtggctgagagacccacgtaaactcagggagcacctactgtagtggtgaagcatgtagctgttggagccagtctgagggggccaaatcccagctctactgcttacatggtttaaaacacaggcacaaaatatttgatgctccctcttcaagagatggagcctacgttccttccccttacatgttggctggatttagtaactcatttctgttaaataaagtggaagtgatggtgtgtaactttagagactaagtctaaagggtgctgtgggttttctctttctctctggaattgtttgctttggggaaaattagctatcatgttgtgaggacaccaagcaacttatagagatgtccacgtagcaaggaactgaggcctcctgtcaacagccatattagtgtatcatcttggaagtggatcctccagccccagtcaagccttcagatgactgcagccccagccaacatcttgattgcaacctcataagtactcagctaagtagctcctgaattctagatctacagaagctgtgagacaataagtgttggttgttttcagccactaagttttggggtaaattgtacagcaagagataactaatacaaaagctatgtgcccttggacaagttaattcactctcctgtgcctctgtttccttactcatataattagggtggtaataacagaatctacattatagaggagcagtaaggattttgtgagttaatacgtgtgaaacacttagaacagggctggcatgcagtaaatactcaatgaatgttagttataactactgttattgataattgcatgatctcaggcaaacacagaaagaacagggaagaaatagagtgcttgctgaatgaaggaaaggtggaaatcaacactagtcttaaccatttgtcatgtactgtcaatccaagctcagcccaagggttagtgtgttcattggccagtggaagtttgactgaccttcaccgagggggccttctgtatggtagggattacactcagcctggcactctgtttatctctctaaatcctcagggccaccttttgtatgaattggtgtatcacatactgtcgcctttctagacatggttggaaaaatcttcaacattaacctggaagagctttaccaaacatcttcgttattcatttttgaaacaactgagagtatccatggtcactggtgctcagggattccctatgtcagcagaagggctggataccattgtgaccattttaattaaaattcttatttgacaagagccagatatttgtatgtatatcaatggcatagagcaaatcatgccttttttcctgtctctctgatacaaaagtgagatttatagatcccactcattctctctcaactggtttcctctactggctaggagtatatatgaacaacagcttgttttcaactatattatttactcattttttaccttttggagtgaaaaaaggttgtaaagttccatctcagtgcagaaattcctgaggaagaaagccctctcgagacaattcagagtgaaatgttgggcaagacccagcattatgtttctcccccagccctccctgagactgagccagtatccaaggatcttcactcctcgagctcacagaacagttgaccaacgaactctcggctgcacgtggctgctgtcaaattcctgggtatccagactatgacggttaattttatatatcaactcgactgggcatggggcacccagatatttggttaaacaaccttctagatacttccgtgagagtggttctggatgagattagcatttgaatcaatagactgaataaaactgattgcccttattcaatctgctgaagccctgaacagaacaaaaaggcaaagtaaaagagaatctgctccctttgcctgactgtactacagctgggacactggtcttctcttccttttggacttggacttggactaggactacatcattagctttcctgggtctccaggaaactgcaggtcttgggaattctgagcctccataactgtgtgagccaatgcttgtaataaatcatgtatatttgtatctgcatagacagatgtatatctctctctttctatctcttcatccatcctattgattatatttctctggagaacccagactacatacacactgtatagaatgcagccaccatcactgtgacaccctcctggcgcttctttaacccatgaacccagtatctagctgctcgccaggacagtccattctcccaagggacagcgctcagtagctctgcagaggttcccatcaaggacactgggcctgaggatcatgttggttgtgaatgtcgctattatctctagaactgaatggaagatttctaactaatctcaaggaacctgtccattagatgtcaaagaataaaaaaggttcggttctcacgaccctagtcagaaataacaatgccaaggtgtagggttcctcttttctctctaattctcttcaggggctgagaattcttgtgtgttgccttacttggcatttgccaattgatgctgacaacttgaaactctcaaattaggggaggaattcccaaggtgtaggcagggataatgaaagatgatctagaaatagtcgtggtaatctgataacttgccaagttcctctgatgtgctcttctctttttcttctctggacagctcttatgttggttttggtctaaaagaagagtgacagttgcctgttggggaatttaacactggctctcacattgtcctgggctgaacataaacctgtaatttgatgaagtgcttctgacaggtgtatgcacatgcttgttggtttcactcggatctgtcttgagggagttgcttcttagaaatttctgtactgagtcagattcttcataacttttctttcacgctaaaaggtaaaacatgagtgactttaaaaatctttctattcattcaaccttttgtcgctgagtacacatgtggctggtgaaatttgctagtgactcaaccagaaagagagcgggagagaggacgaagagaggagtagagggagcgacccaaatcacattttctagaaggtcatacctctgagtagtaaccttggttcagtgagaccactcacccatggagctcctgtgtaatttgaggtcagggtgtgtgatgctggtctcagttggttgctgaatgggatgaacaccagctgccctatttcttcattaaggggaaagaagtctgtcttgtgcatacactggggactggccttggcccatcacattactgtcctgttgcttctttcattccacaaatgttatttgttcaggtggtcaccaggtagacaatagaaggggaggggtggctcgcaaggatggtggattagtttcctgcagccgcagtaacaaattaccacaaacttggaggcttagaacaataaaaaatcattccttcccatttctggaggccagaagtctgaaatcagggtgtcctcagggctgtgcatactctgaagcctctagaggaaggtcctttcttgcttcttctggcttctcagggagtagtgttagcacgtaggctggtcatttggaacaaaatgcaagctgactgcccagccgagccagcagggtcaaagagctcagtctaaaaattaaactattgaaagcactacaagaaaacaagggagcattattttatattggttttataggaatagaggaggcctttccaagtgtaacgtggtggccccaggcattcctttgctggtggctgcatcactccagtctctgcctccatcttcacgtgaccttcttctgtgtgtctcttataagggcaattgtcattggatttaggggccaccaggataatccaggatgatctcatcttgagacccctaacctaattacatccttataggaaaaagaccgtttttcctataaggccccattcatcggtactggggcctaggatgtggacatatctttttagtggtcaccagtcaactcactacagatgggttggtgcttaagcagtgagcagagtggtcctctgtccgcccaggggtgttccttggggtggggccaattctgggtcctgctgctcatccctgggccatctgtccctgcagcctattgggaagttctgcaaatccagtggcctccactagatcaggagtgatggggaaggaacacagggctgcttcagggagcagcgggctcagccctgccagttagtggggaaccgcgcttcggccaaatcagagctggaacattcaagccagcctttgttttcccaagtaaatccagcttgcttccatactgtttctcagtctctggcgtcaagcgagggaagcattcctggaaaaatatgtcctctgaatcatattaccatcctgatttacattataatttcttcagctatgtattcccagagggaggaaattggctacaagacatcaccaaaaattcacacataagcacaaagcaagcctgaaagaaaaatcctatttgcagaaaaaggagccagtgttgcaaatgtggcttcccccgtgacagaaatggccctggttaccagcaagaggcagcagggaagaagcccccctttctggagggattttccaggttcttgcttttttaaaaacagcatttaaagagagcagcttgaataaatccttcctcagggtttcctggagtgatcatcttgttcctcccttctcccctcctcctcctctgtcttctctaccctctcttccttctttaagcccactggcttctttagtttttatttgcgcattgcagataacacttctctgctgaggacctctaggtgcactgtctctttaagggccagaatggtctgttttccctgcttaacatatttgtttgttcgtttgcatgaaaagggtaggaaagaccaaagcctggcagggaggtagaaaggaagacaggacagaagccaaccccaagggagtgagatgcacagagttccggtgtggggagcctgaagtggccccacagagctggggtctggacctggggccaggcttctttcttggtgcgtcccaggggaaggagcaattatgtgaagtggcagagggagaaaggatcccttctgcagcgggggtgagctggcttctcgtcatgcctactgcactggctgagtgggcaggaggccaggcatgaatctttctgatggtctgagaggcacagtgaccacgtttggtgagcctgccctaaacagaggaaagatgttctgtgtcacacctactccaacaacaactgaactggtctctagtaataaacaagaaatgatcaaactgccctataattgttgtctgagtctccttgggctgtcataacgaagtatcacaaacaggtggcttgaatgacagaaatgtatggtctcacagttctggaggctggaagctgagatccaggtgttggcagggttggttcctcctgaggctgtgaagggaggtctggtccaggcctctcccccgggttatggtagttgctggcgatctttggctcttgttgcatcaccctgacttctgatgtcatcttcacacggccttctccccgtgcacatgtctgtgtccaaatttccactccattttttttttttatgaggacaccagccacatcggactatggtctgctcttctccagtaggacctcatctaacttaactaattacatctgcaatgggcctatttcccaataagatcatattcttaggtactaagggttaggactttaccatatgaattttggggaacacaaacagtaattgtgaagtgttatgttagcataggaaggttaggggaactcagactggtatttgaaacagttaccctagcctaaggttaggaatattatttggaaaccattgttttcttttgctaaagtgggtgggataaaatcaggaagtacaaagctgaagaccacttaagtccatggaggaaagccagattattcggtgaaaagtgttaggacatcggctggtcttccagcaaacaatgcaagctggctgcccagccgagtcagcggggtcaaagatctcagtctaaaaattaaactgttgaaagcactatgagaaaacaagggagaatgactttatgtgaattttataggaatagagaaggcctttccaagtataacataaaactgagatggcagaaagaaacatgtcaataactttcactacataaaataaatatattttgcaggtaaaataccattaacaaaaaaatcaataagacaaatgacagactatgaaagatatctgcaaaacataaaactgacaagggagtcatttcctttatataaagccagccattacaaatcaactagaaaaaagaaaaaatcaattaggaaatgggcaaagagaagaaaaggaaacaccagtaaatatattgaaagatgcccaactacatgctagaaaacacgaatgacacccgttttcacttatcctactggcaaagatcaatgagttgtttctacccagtgtggatgaaaataggtagacaaaggcgtgcctgtctctggaggtaggattggaaatcaaatgatcctttgtaggagggcaatttggcaatatctttaaaagcaaaatatgcatatcctcttttatcccatcaatctcacttctaagaatctatcctggccgggtgcagtgggtcacgcctgtaatcccagcactttgggaggccaaggcgggcggatcacaagttcaggagattgagaacatcctggctaacatggtgaaaccccgcctctactaaaaatacaaaaaattagccgggcgtggcgcgtatgcctgtagtcccagctgctggggaggctgaggcaggagaatggcgtgaacccaggatacggagctttgcagtgagccgagattgagccactgcactccagcctgggcgacagagtgagactctgtctccaaaaaaaaaaaaaaaaaaaaaaaaaaatctatcctatggatatcagaggtttactgcactgttatttgtaacaaaaaaagtagaaagctgtctataatattctctagagcactagttatagaaatgatcgtatgtccatcaaataaagtattattttgcaatttaaaaagaacaagttaatgtgttaataaagatttgtggtatatgttaaattaataaaaagcagttgaccatatacaaaatcatccacttccatttgtgtaacacaataggaatatgtatgaatacatgttacaatatacctgaagaggcatagaacgtttccagaaaggcacccaagtgacagtgagcacggcttctatccaagcagagggactgcagaacagaggatggaaagggatgtatttttcattatctatcctttataccatttgaatgtcttatcctgtgcaagcattacttttaatgtaaaaacacccaaattaaaatttaaaaaatgaggaacagaagattaatccttctctgtggacaaagaaggatttgctgtggggtactcatacgtgctctcttgatacccggttgaggagggggacaggtgaaatctaatttctttagactgaagcagatggagggagactcatcactccagtccaactggctgtgaaggtggaggaagctagtgtctgggaaggagagaatgcctatgattgaaaaaatatgtgttgaagttggtgtttatagtttgcaacctccacgcattcactctcccgggtgaagtcttttttttttttttttttttttttggagatggagtcttgctctgttgcccaggctggagtgcagtggtgcgatctcggctcactgcaatctccgcctcctgggttcaagtgattctcctgtctcagcctcctgagtagctgggattacaggcacccaccatcatgcctggctaatttttgtatttttgtagagacggggtttcagcatgttggccaggctggtcttgaactcctgacctcaggtgatctgcccaccctggcctcccaaagtgctgggattacaggcgtgagccaccgcgcccagcctctgtgtgaagtcttaatcgggacacgggtggagacagggacctgtgcatttatttggtcatggcctcaaattcacatgcagcaggtgtcaggatgtaggcttgacaggaaggaaggcaggggttgaaaaaatggagggtgggcagaggtggggtgggctgggacaaaacccagagagcactcttcttaaaggcaggcaaattcagacttgcaatacacattctgctgaacgaagctaatttctgaggaaagtgaggcccagagtggttaagtgattcatgatggtatcagggagggccctgagggttctgatcactcccagcacttgatccaaaggccccaggcccttggaggcatttcagtggctggcttgggttaaaactgcatgacaggcgcctcttaacctgggcctcttgggcctggaaaattggctgctggaagggagaaaggctaagggtagcgtcccagccggtatctcagcaacgcggggttacaggccgcaggatgagtgctccagctgacccagactcaccacttttcagttgtcatgcaagcaagcaaacacttcccaattccaggccagaaatctttctaaactgtggcagccgcttccctttcttcacaagcagacggcactgggtataatttaagctttttcttcatgtctccgtgccatcttgctgaaacatcagctactgttctgtccttcaatgcagacctggcctcaggagattgtaaggtgggtagaaacattggcttttctcataaaggattccagacagtgacgtgtttgggctttttttctttgatttatagctctgggctttttttccattcactgtcagacttgcctcttgttgctctcaatgtgcctgttttatagcaaatccatctcctccctttatttgctgctttggtctcctctggtctgggagaccagtcagctctgagcttgttaggatttcttattagaaaaacaataaataaaaaggacacacctctgcttagcttccagcatcggtcttagatgctgggatggactgcacgggcattgtggcatcttctgtgattgcatttctcccctcagtttggagttcttagttgtattctagagtctagatggataaagttgctagataaacaagtgccagatgatggaatggtttctttgttctaccaatagcatattcaataactgtggatgatttaaagtgtttttgttcactgagtcctaccatctgagatggaaggtgtccttcttatctgacctgttttaggcataaaacacatgaatgagaaatagagaactctctatttctatagctgatttttaaagagcttggcagacaggtgtttcttcttctttatttttctcttataaggataattttagagcaaaactgttctaacatatttgaattatatgtgatgggattcccagctcatctcattcaaattcaacctaaaaaagaagcattacctgctaattccttattagtaagcactttttctaacttgacatttttagatgtttgaaccatctgtcattttacaggcaaatggaacctcttgagtactagagatacacccgtattttaaaagcattttttttttaaaaaatctactacattctagattctatgctatgtttttttttatcatctaatttaataatcattgaaacctagccaggcaggaatctcatcagataaagaatatgaggtccagggaaatcagatcagtcagtcaaggacacagctaatgagcaggagggacagggcatgagtgaaagggctctggacacaagtccagggcttttcctagtgagcctaaccttcgtttttcagcttaatgggatgtgtgacacaacccactgttggccaggcttattctgtgatatcggactcaatgacccaaggggtgggggagaggggtgcagatgccagataaggcaccagagattattcacttatgagacatgtcttccatgatggttggttggaacccagacttaggtgcctagtaagtattaatatttttctcttagttgtactattttgaaaaacttactagacacaaggacatgatgaaagtgttggctgaagtatcacatccaaagaggggatgatggcagtcaaatggaacaggtttgaatatgtttcatgaatataattctattgtagtagagatacatttagatatatgtattgtagatatacaccaaaggtgcatatatcattggtgatataaatcaccatatatcgttggtgataaatcaaaggtgatataaatcaatggatatctgaatgatgtatgtatatgtataatatatctctattctctctgttcctctatctattgaagtgcaggaggaaatgagaagtcccattacaggaaagcttgcagagtctacagcttttcaaaagcagtcactttctggtggacagagccctagtaatgaagaaaatggtgctctccaccctccaccatacttagtgagatgaaattttgactaattgctctgcaatcacttcaaaatccatacatactaaaaagtctgatggaatggataaagaagtgtcacttggaagcaaattcataagcaaagtatattttctttttcttcttacttccccctttcagtggtttccatcttgttttcctctgaccttttaaggggctcactgttctcatcctgtctctttgttatcagagcctcccaatagaggagagttacagttcaggtcgaacattcacggcatgacttatctgtccatctatctaaccacagtcctcattcttaatacatactaggcactcagtaaatttctatcttctctctcttccttcctctctccattcattcctgccaagaattaacaatctattggtgagaagaaaccaattaccactgagtatcagacaaatgacatgtcatgccgggctatgtttatgttgaaactcatggcccaccgtgaaagaaaagggttagtctcttaacacatgaagtattgggagatgagtgcaagggacgtggtgggctgggactttcacccacaccattgcttcctatcagggaagcagtagtgtctccctgtcaactagatggcttgggtctcaggcagagtcaaaagttgggtctcacatggccaagacaccaactcacagattctccattaatgacccccactcctgcattcgtagggaatttaattttagataaattatttcaaaaaatagaaatactcttatccctctgcaataaactacagattatccttataaaaatcctttctttctcagtataagattatgcaattaaaattgtttgattgaaattgtttgattgacatatgatataattatttcaaaatatctatatatttgataaattaccagtgactatgcttcttcatgtcatcattatgaactactcaatgttcaaaggtttatcattttccatgtaattatttttacattcaaggctttctactctatagcatgaacctgacaataacgattcctccttgaatctgtattgaagtttataaagcttcaaggacttgtcaatgatacataaaaagttaattaaaatcattcaaggactgcctaccataagacttgcaataaactgtctgtttgcattgaaatgatggggtgctctgtggggtagattttcacctccagccaatgtctactgtggagctgcatgcttgcatttgtaatgggcattgctgggataaaaggtctcagctgtgacagtcttaggaaacctcaggatttttcaattttccaaaggcctaagagtattttcttgaaatttcggcatggtgccacagctaccaaccatgacacctggctcagtgaatatctatggccacagccagggcacaaatgtgaattttaaaaattccacaaagcccctccttttccaaacagaaattggacataaatattcgtacatcaaagtaacatattaatgggtgatacttcaggttacttcttttttcttttcttttttttttttttttgagatagagtcttgctctgttgcccaggctggagtgcagtggcgtgatcttggctcactgcaacctctgcttcctaccgggatcaagcaattctcttcctcagtctcctgagtagctgggattgcaggcatctgccaccatacccggctaagtttggtatttttagaagagaccaaggtttcaccatcttggccaggctggtcttgaactcccaacctcgtgatccacctgcctcagcctcctaaagtgctgggattacaggcatgagccaccgtacctggcccaggttactttttcaattccaagctaagcaagcttaggtcacacctttgaggaataaggacagagacagataattgaattgtgtggggctgagagtgcagggtttccaacccctgaagccactgcaagggcagatggccaggtatggctaggacaacaatttcctggcacccctaggctcaggtgtaggggggcctctgtcaggacctctaaggattcccacagggtcttcatttactagactggaagtgagagacatctccctcccctcccttattgggggctgtgatgctcccaaatcttaactttctgatgatttatcttcaatgagggtgaagtgctgggcattttgacaccctcccagcctgcttggcacagcctgctcagagctctggcagctcttgttggaaggtgggaactattgacacctattgaatgggagcatcagctgagaccgacttctaaggagttcctctgaggtgtcccgtatcttcctgattcacagtttggcttctggctagaatggtttccaggaacatcttcagccactgctcagtgattacggtctctgttctagctttgctcagtttttggcaaatccaaaatctgattttggatatgacagtgggatatagtgagacatggttggaggccactcggcaggggtggaatctgtgtgagtaaccgcgcacctgtgctcacaggaaagcacagccgttagaactccttagaccctgcaggcaggccccgctaagttaaatagtgacagggacatgaacatattcattcaatgtgcttttgctatgatccaccactctggatcaaacatattttttgagacgttttgctgtataattaaaaaaaaggtttctctaacctcagctgatggcccatttatttcaagcagtttgggatgtcgtggcattccagcacttagtcatttggggtttgaggcagtggaatttgatatgtgtgtccatttccatggattgcattaggacaaatacttaatgcatgcggggcttaaaacctagatgacaggttgatgggcgcaacaaaccaccatggcacatgtatacctatgtaacaaagctgcatgttctgcacaagtatcccagaacttaaagtaaaaacaaaaaccaaaaaatcccaaaaaacaaaaaacgtagagtggcagacaaattcccatttaatatttgtgtttcaactgcctctccctttacccttgagaaaaaaaggcaatgcattttttttttccttcagaataatttccaaggagcagcattaggggtgtgaatggtacttaaagtgtgtggatttaaagtagacagaagaatcaatatattctcctcagcagtgccagtcccagctcccacactgatctgctgtaaggatgttgcctctatcccaagccccattttagtgcaacaatttggaaactgacgggaatgtggggggccaataggaaccgtgtcttgattagacatgtgctggcctgagagacaacattctcttctgccaggatgttggggcccaatggttggggccttcctgctctctgaaatagagtttaggttctggctttggagtgaatcaggaaaatggcagaacccttcaaattcactttcaaagagacatagaatattgacaatgtgacattctctaacaaacaaaatgtttccattgataaccacaaattactcagcgatctgccaaggaaccattgatttagcccaaatttctaaggccactcccctcacctaaatggttatttcattaaacttagagcgaaagggtagcattagatatgctaagctttactcttaacatagataccaagaagggacagtttttgacgcaaatctttatttgggttgacaagagccacaaagaaactcattctgtaagtgagcttctacaaagtgtcactagtgactgccgcaccctgtgtatgttccatcatgttttcaagcttttattaaaaatggttaatgggtagagggaaacatccctctattttgacagcaggaaattaaaaacatgaatccaacttggaaatccatcagatgacctgtttaaatgtcttaatttttcgagatagatggtaccaagtgctatgttttcttgccacttgaaggtagaactgatgttttaggcaacatccaagcaatgtctcgttcaatgcccacataagcaagactgtaagttctgccatctcttgattcacatcaccatttggaggatgggagtcttaaatttctctgtcacaaggaggggcccagggattggctgagttgcagaatgaaggagtatgcaggaatgaaccacggcggatgagtccataagacagaatcctggaggagaaccaggaaatcaaaccctcaaggtgggctgtgtggatctgggacaagccgggagagaagcaggggccaccgtacgccccttgggcctctctagcaggcaggtgctcgcccctgagaacctagatcctctcagacgagagtgggcaggaagagaggtgggaggggtggggggatacaacatagtgaaaatttaaaaaattgatacgtgattttgggataaaagcagaaacactattggatgagctagaacagagctccccaggcccacagacaaatggtctaatagattaaatggtaacactttgataatcattataaagaagtttttcatagaactgttaccttttggtagtctggcttcctcatgccctccctccagcggtacccactttcttccctcaacctgaactcattcctgcagaaatacttttcacgcttttcatttcttccatgtgcccactatcttcattcaattatttaccattttttttttaaaaaaaacaaacattggaacaaatataataaaacttctttacattgattatctaaacattgacatttaatcccctagcctttttgtctaacagttttgtgttgtgccagccaccgggcaaatggtgccttcctgccagaggggcgtgggaagtaagaaagtgctgagaaggttctggagggagaaaggcccctcctgggacagaggtggtgttccccacactgcagcctcagatacctgtgggccctgagttttcctgaaggcactttctgctgctgtggaggtgacgattggacccatggatggccggctgtgtgtttatcttagtgcttctcaccaggacagcctcccatcaccttcactcagacccttgacctcctccaccttgatggttcttttagcgaggacaagctcacacgttcaaatagagaaggggcatggccagctttggagaaagagtactgttagcatttttggtatctttcaatactgcctgactgtggaataagaagccacattttacatatagggattttgccttacataactttagataaagcaccattgatcaagctacatgtgtggcccttacaacattttagtctgcaaaaagtcaggttctctattccaggtgtcagcggtgtgtcggggaacttatgtggaggctacagacttttagtgatgatgaaaacattgtgtccctttattattgctctgatttggtccaagaagaatagaagtactttgcgtaatgtcatggactgaattgtgcaccccccaagttcctatgctgaagccctaactcccaatgtgactgtacttagaggaggtcccaaaggtgaaacgtcccactgtctactcattgtattgtatcaggtggggaacctgatccagtagttccagaagagacacaaaagagggctccttctctctgtgcctgcacagaggaaaggccccgtgaagatagagtgggaaggccttcatgctaggaagaaggccctcaccaggaacccaagctacctctatctgggacttccagcctccagactgttagtaaataaatatctgttgtttaagctgcctagcctatgatattttgttatggcagcctgagctgactaatatacacagcatataacacagccaatttcaggggtggtgctatggagagagtagcccctagggtagggacctaaaaagcaccaggaatgaagtgagcatgcacaccataatgatgcacaatcttgctgcatgcccaataaatttgattccaggcattgttgcaaccacaagggagacctggcttgttacagaacttaacagtgtccatcccataaaaggaaatcaatggctaagcaaaagtccaactattcttagtgctgtgacatgaagaaatttccccagagagtttgcaacaaggcagctggtggggaagttaacaccaccttctagcagacacagggtcagtttcacagggctggtttttacattatgcagctcaataaaagtagtgggcttctaagtgtagggtggctctttgatcctcctgcaggtgttaagagctgggtctgagacttctggaagaatgcaggagctgtgactttatgcagacctccctacatgttttcactccagatcaacatgctggtaagtattggagtgaggagcttgggatttctccctgacagtttctggaaggcagtgtttttgagctatgagtttagttcagatacgtgtacttagcagccagttaagctgggctagaaccgacctcttttgtaaatggagggacctggtatgaatatcttctcggtacaccaagtgcctatgtcttggcttctaaagaccattccctagtaaaaggaacaaggaatctttggagaaatgtctgactccagagctggagctgaaaaagtccaaggtgagcctgtaacatctttttgtgccagaaaaaaggaagaacacacaaaatgattatgttcaaagggcaaagagccactagaaagggatcccactggccagatctgggataatgtgagcatcacaaataatatcagtagcagattataactcattgaatacaagaggaatccatgaatccatactgatatagatagatcaatagataactaagggaggggaaaagctcttccttatagctgaaagagaacacatcaatgtagaaagaaccatgcattcagaggtaaccatcgtagaaataaccgattcaggttagaattatcgatgaatgctaaaagcaaagtttgaggaggaataagatatttacatggcctcaaagtaactgctctgagatacttcttacaaggtgaaaactagtaattttaaagttaagaaacctggcagacaccacctgagccagagatagaagttaacatcattcaaattaggaaaagctgaccttatgtgcctcctgatataatgcactgggagggacacagcaccactttgtattcttgccccacagacataacctaaatctaatcatgaaaagaacattaaaaaccttaagttgaggcacatgctacaaaataactgctctatagtcttcaaaaaattaatgtcatgaaagataaggaaagacagaagaattccactagataatatgagattgagagacatgacaacaaagtacgacctgggatttcctagaatataagaagaaatggttggaaaaattggcaaaatctgaatcaagtctgcagatgctactatatcagattagatatagtagcattatgtcaatatgcattttctgattttgaaaatcacactgtggttttgtaagactgtcttcacttttacataactgcatcatgcctacagtttactttcaaatgattaaaaaaactcacatgtatacatgcattcacacatacatctacatgtgtgtctatatctagagagaatgatagatgtggtaaaatgtggaagatcattccttctgcccctagctcctgaggtagcatggcgaacaggatcaatttcatgatctgaaatgagttagctgtgttgagcttttgtagccagattcactcatcaaattgtcctcaatgaactctcctgtggtttggatccacagtcaggccaagaggtatcttgacaggctccctaaattgtcaccaacaggtgctgtggtcttcatgtgctcagcatggtgccaaggggaggagggagcgagaagaccataagacgattgtttgaccaccgtgtggcttaattctgcctggagaaatgtcattgacatgggggaagtaggaaacagaacaggggccaatggggtgctccccttgctggggagagctaaactggtttgaggagggagcacaggattggctgaaccctgtgaggcctcatggaagaggcagagcttgcttggaccttacagggtgtgaagaatttcgattggctgggggaaaggagccatagaaagtggggtgggaaagacagagaacaaagcaagccgggaagaacctgagtattcccaatgtgtgttttccagggaaaatccattctagaagaaaacgactttgagttgagaaatttcatatgtgctactggtactcaagcgtttgttgcaattattctgatccaaggtcctgcctatcagctggataggaattaagccaaaccacatcttagggtctttgtgagggcttcccaccaaccacatttggttggtttggtgatgagaaagttcaaacaatattccttgggggccatgttggcaatagttgatctgtgtgattggatgcattttcaaagagtttgttaatggtgcctttctgcatagacagtgttccacaatcgcctgagagaggataaggttgtgtggtgtggatgtgtgatttatatttgttgatggtacattattctaagttacactcagtctcctaggcaaataggggtgggagagagaggagtttgcacaaagagagtctcttttggagtgggtggagtttgggacctttaacgttcaaatgcatttatgataagaataaatgtcggtgtgaggagttgggacactttaagtagtgggagtacttttcacccaaagaaagacagagcaagcccaaaaggaaatgggggcattggtgcaaacactcgttaaacaaagacactcatgctcttttatcattttctttgaaaacagaatgttaataatagtactgtttactgcgggatctctgcttttgaacagaagttcaattttatcttcctcccaaaggtcaggaaacctcatctcccccttattttctcatccagggagaatgcaaatgcaaatacacatgcaaatgatctcatctcctcatggactgtggccacttctgcctgtccaggagaaatggatgctggctgccctgcttctccaggcgggggctgcccttgctgcatcctggcagtgatgatgcggtgcccactcgaagagcggttctggctgggagtgcgggaggggggctcatggtcttcctgctgttcccctcctcatcgaaaatgttttcttatgtatatgattccattccatattgtattgtaatttgtttttatgtgaggaaagaattaaaaatagttttgacttttgttgttgttgtttgagacaggatctcgctctgttgcccaggctagagtgcagtggcaccatcatagctcactgcagcctttcgacctcctggactcagctgatcctcctgccccagcctctctagtagctgagaccacaaacgagcgccaccatgcccaggtaattttttttttttttttgagacagagtcttgctctgtcacccaggatggagtgcagtggcacgatcttggcttactgtaatctttaccttcagggttcaaatgattctcatgcctcagcctcctgagtagctgggattatatgtgtgtgccaccacgcttggctaatttttttgtatttttagtagagatggggtttcaccatcttggccaggctggtcttgaactcctgggctcaagccatcctcctgccttggcctcccaaagtactgggatttcaggtgtaagccacggcacctggctaattttgccattttaaaatggttaaaaaaaaatccaaagtgaagaataatactttatgacatgtgaaaatgatatgtgtccataaacacaatttatggcagagttgagctgttgtgacggagactatccacaaaccctgaaatatttacaatctggccttttacaggaaattctttgcttaatccttgctctaaaataccagttccgtaagggcaggactttgtcctttttatctttgtacaatgccaggcacatggaaggttctggaaggtctttgcctgcagattgagtacacctcagcttcggcccccttgcctgttgagtttttacctttcaaaaggccttttgcatagttttggaggctcatccttcccactcctcctctattactgcagggggaagggatacttagggatagagcattttttattgatatggatacctcatattcatattaattagaaacttctggaaagcgatcacccttcccatgttttgctcttctgagagccagcttgttcctctggcagaggggaggagatttgccagggaaatcggataacatcaaagggagtccctgagcatgtaattaggtagcatgaaagccttggggcatggctgctcttggagtccaatctcctggccttggagagtctctgttggactagacccactttaaaaaggggcacagggatattcctagttggcagagtctcttgagtctcttgtgtgattttgagactgaaatctggggacaagtttgctttttggatgtccgctttaaactctctgtatttatgtcagatggagtttataagatgtgtggtgaatactgggtgggaggggaacctatagaatagactcttagtaaaatgtgtctttaatttttacattaaatgacatgacagccttcatagggaagccagatgttgcccacaactggtagagcccagattacatagcgtccggtggaaaggaaactcttgagggtctgagacatatttagaaaggccacaccttatttttagaaaaatcatttatttttttcatcctttttattgagcactgaccatgtgccagattgtgttactttctgggaacagaaaaaaaaaaggcataatctttatcctcaaaagtgtagtctgttgaggacacccacatgtggtcagtcacccatgaaacatcatggagatttgcagaaactcagcagaagcagagggaggacttttgagaaaggttccataggggtggcatttgcagggagatttgtgggcaggagttattggaaaggtaatggaaaagggtatcctaggcagagacgatgtcacagcacatgtgcaggccagggttgaaataatccatggcatattcaggaacgtctgcagcctatggaggtagtggggcaaaggacaggacacctggagaggtgccatgtctgtgacaggcaaaggtggttggtctctattctctagctcctcagaagctattgagaatctctgaaccggggagttgaggggatgagatttttatgttacaaagtttattctgacaatgatgaggaagggaattgcaaaaacgagagactacatttagggagatcagtatggagcatggtaatggtccagcaggagggcttggtggcatgaaccagggcagcggccaagcccctgagaggaaaggatgtttgggtactagagacaggtacaagatggaatggacaagcttagccagggccgcctcatatggttgtgcaggatgtacactgcacaactcaccacatcttaggggtacagctatatagacctattccacagacttcccagcagatggcagtagagtgtcttgaggagggatgccttttgctcatttgcataagagagcctatggtctggcagcagccccatgggaatagctgggctgtggagcacgtgggagggaagagcacaagatgacggccaggtcatttccgacctgggcacctgggagacaaagttcctttcatcaagatatgaaatgcatgacaggaagcaaatctgactttaggacacattatattttagggacttgagagccaccccaatggagatgcccaggaggacacagctgcctgggtctgtagcttaggagagaggcatggggctgtgcctgtgggaactacctctatactgacggaggtggtgcccagaggcaggaagagattgcctgggaaaatgtgcagaagggaagcattgagggtgcaggacagagccctggggaaccaccgaggttttgaattgcaggtggaggaagggaaccttgaaggagacagggaggaggcggttggaactggttgcctggagttattcccattgccagaaggtagaggcttcaggtttgaccaagaccaggttaactttttgtgtgtgtgtgtgtggcaattttaagtgactcaagacttcttttctatgtgcttaagagagcagtctggtttgtgaccacataggagatttcactcatttattcctcctttcattctctctgtacctatgtatccagggcccgctgtggtccaggaactgctctgggtactgagaggatagcaatgagcaagacaaggccttgctctcacagagcttacattctaattggtaataattaaattaatgacataatgtcagctggccatgagtgccacacagcattgtatgacgcacagtggtcagggagctagtttcttttgggtgatcagagaagacctcctgagcaagatctctgtgctcaggattggaaacccatgtggctgcaacatgtcagttgggaagaggttggaggtgagagcagacaagcaggcaggagccaggccagggggatcttataggccaaagatttttccaagtgcagtgaaaatccactggagggttttaagcaagtgaggtgatttgctctgatttatgtcttactaagagtgctctgggccgggcacggtggctcatgcctgtgatcccagcactttgggaggctgaggtgggtggatcacttgaggtcaggagttcgagaccagcctggccaatgtggtgaaaccccgtctctactaaaaatacaaaaattagctgggcgtggtggtgggcgcctgtaatcccagctacttgggaggctgaggcaggagaatcgcttgaacccaggaggcggaggttgcagtcagctgagatcgtaccactgcactctagcctggatgacagagtgagattttgtctcacaaaaaaaaaaaaaaaaaaaagctctgactgttctgtgccaagtgaactttggtagcgtggtcattagcagatagaccagttgaacgtcacggcctccacattatgacaacttaatctgggatggtggccatagagacagacatattttggaagtaatacccataggatttccatggtaagggactgagatgaatctccgatgacgctgtagtttttgacttgagtcacagtatggctcaggataacatttatggccctggggaagatgaagagccgaacagcctctagaggacttgggaaatctctagcttctgctttggccatactggttgtacaagcttgttaggccacgtatgcatttaaatctttgagtgcagagctcaggggagaggttagtactgaagatagaaatttagtgtcacatagaaaaagatggtaattaaagacaagggctgaagtcgctgagaaggaaagtaggggacaggactctggttggaataggctctgaggcattttgggaagaggagaatagcttgcagaagagaatggaaaggcactcttattgaggtaggagggaaagcagtaggggagtcatgagtgccaaggaagaaagtgctggagagggaggctgcggtcaagtgcgctaatgatgtggagaggccagggaacccaggaacagtggagtggtctttggatctggcgggatggacgttgttggtgagttttggtggtgtggtgggaagggaagcccatttgagatgggaagtaagaaagtggcgaaggagaggacaggtgattctttctagaagtcctgagagaaagagagctgagaaatgggaaactactagaaagggacatggcaccaaaagaagtatagttttgtttttctttgtttgttctttgaggtggtggatattagggaatgttttgatgttgatggaaatagaactattaggaaaaattggtgatggaggaaagaaagaggatggttgtagtccaaaagtctttgagtaggctgagggaatgggagttggagatggcccttgatggaacagggctccacagcaacaggggggaagaaagagggagaggcccaggtgtgtggcagaaatgggaaagagggagaggcccaggtatgtggtggaaatggtcgtgagaagatgccagtgttcggtctgattgcttctattttctcaactaagcatgagaccaggttgctatctaagggggagatggtgttgaaagactgaagagagggaagaaagtagaaatcaagagtttggtgggttggaagataaaaagactaaacatttatattaaattcatattacatctgtggatttcgtttcattataagaagagaccctggggtgagacatatgacaggtaccccctgaaggcaagtgcacaaaacatctaacaccctccgtgccccctctccactgggccaccaccttcctgggtcatgggtgctcactgttcatgagatgctccttgtacctggtcaagtatgtgtcagactgcactcaaggacagaaacgccactgtgccattctacctttcaatgtggtagtggaggacaccttgcctggctggcacagggaactcaaagtacccacactgagcctcttcaatgtcggggatgagaaatccagccacaggtgaggcttttgctaattcatccaccaaacccaggatgtgactccatgcagctgtattggaacccagccccgccttgccctgctgggcctggtttgtgggtggcccctcaagctgccttccctttcatttgtagtcatgacccatctgttgttggcttaacagatatgatctctctcttcccctagccttgggggtatggggtaacacagggtctgcaggccatgctgaacatgctgaggtccctttgggggaacaaaaagaaattctgctggagggaccaggaaagtgcttgaaaatctctcttgacccatccgtgtcggacctcacgaatccttaacatcatctagggggatcacgaaccagcagcatatttgttcccctgaggttgtacaccttttccaactttgtttgaggaaacataaagtacatattactgagtatgttaagcaaacaaagccctgctttttatcactactttagctttccaagttgtattaaacatacttaattttgggccaatgcgaatggagccttagtctattttagactcagtctctacagtctagccatctcagctatcccctattgtacattctcctctaatcccattactcatcaagccctccattatccgtccgctttcacagatttctattaatatttacactatataaaacatgcttgaggaaatgtaaaaggaaatgtatttacttagcagatgaataattaaaatcttcctaggatggcctcagtatgagtcgtcgtcatcatcatcatcatcatcatcatctccaaaaagggtcttgttgagtgttttacagtggaatggaaaccccagccgagcttaattaggctgatcaaagcctatatctttttattatagtgctttctggcagggaattcagagtcaaaattgatttttccctttcaatgttaaacttttttttttcctcccttaagggtttgtcagctggccgcactttgggttacacttggttgcactttgggttatacttggcacggcaccagggcattttggatggggttaacccagagcttcaactggcacagtcacctgataacactgaattgggtagaactggagggtgggagcctctagactgccctttcaagggactcaatgccaactgttatgcaagactggatcattcctgcctgcctcctgcagtcaggaaaggggagcccagtggagaagccatggcctgtaatcaagaaattatatatcattgagccatagttgtcggtgcattaatgaactcgaatcaataaccactatcttggagctcctcaaacatgccataggatttgtgtaggctcctctagaggggcactggagcagatagactggggaaggggcagccctgagactgcatcctggcttcatcacttcaccagctgggtgaccttggccaagttactgtcttcccaacccccttgcaagagccaacttcctcatttgttaaatgggaatggtacccacatttcagaattgctttgaagatttaaaataatccatgcaaaacatctaataaggtaattggcatccattaggcatgaaataaatgacagctatgagaacagtatgattcacagaatcatagtgtcactctcttaattgattgagcacctactacgcaccaggctccacagtgaaggatgtgcatgattatctcgtggaatctttttgtaggtacaagtatcattcccatttttcagaatggggaaaaaaagattttgtgaaggtaaggaatgtgatatactcaatcacagggatagtcaagagtggagacagagtttgaattcagtctgtctgatctcagtcttcaccagtgaagaaagaatttaaaagctagaggagaagttctgcaaagtagccagctgcagattcatttcctggcaagtctagtatgcttggcagtatacaatggccaacttgtcaaaatgttaatgtgacattttatatcaggcaagataggctagattttaccttggtgacaagcaacccaaatttcagtagcttaacccaacataaggttatttcctcagtcatcctgtatatcacatgggacttggcttgaggtctactcttcaaagccagtcaagggtcaggaggacagaagcttctctgtgacatgtgcttccacgagagccttaagaagtgggaagggaacacactttggcttgtaaagtttccaccagagggatactcacctcttaatgtttctattgatgggactactgttcgcatagccctgttcaacaagaatagggaaatgcaatctaatacgtgtctgaaaggatgaaagctgggaatttttggtgaacacgctaatgacaccacacatttcaaaacctaactcacaaaaaatttttcagctcagcttactggttttcaaaaccatgaggcgatctgtggtaaactgaaattgttgctctcaatgatttactcgaagctcctgtgaaaaaattatatttccccattttattgacattaggcactgccatatgacttgctatgactaacaaattgtgagcagaagcgagtgtttggccctgtctcttgtttttccctgacttaagaacggtgtgtcctatgtaggggctgctccttcagtctgcatcttggagaaaacaggctgtaaacagctgcggctgccatgtagtgcgaatgagaaataaaccactgttttcagcctttggggttgtctgttacagcagcataacttagccaaagcagactgatatagtatctatcattctttctatgtaaacagagaataatgaaattggctacatagaaattcacatttactgtccacttcgttgaagtatagctgtactttaaagcagatgtatctataagaactaaccatgaaagtaaatattatttggttaacagcacagaaatgcattttctaaattggaacatcagctgatacctcagaattcttatgaaaaatctaggagaggaaatgggaatatagaaatcatattgttttcaaatgtaaacgattagtcttgttctcactgagcagttgcctcagaagacctgggagtaatctacattcatgtccactttcggtagaaattggaatgatgagacgttactatctataggaatgcaaagtcccttctgactgagtccagtgattctcattaattcagatcccatcgatttgtcattcatggcagtacccgggcagaggccaggctggcttttacccttgcattgtgcttgtgcactgtgtggcctggtgctcacaggttaacactcgctgttttgactattcagagtggttttagaggggagtcatttgtcattctatcacagcactaactgcaaggtccctggggacaatgaagatgctcgctgggactgggtctcccgactgcccggcctcctgtccccgcaaagctttactctttcttgttttttgcctgtgtggtctatagaggaagagatgatctgctctaatggaattcagagggttgaaaggttacccgtgagtaggtaccattattgttcccattttagagttgaagaaatggagacagacagaggttacgtaaggcagggaagggaacaactgtggcttgaacccaggatggcctgatgctgtaaatgacacaaaggggcacagatgaactgagctatagccagagaagttaatttggaaaaagaagcttactaagtaattaatataacaaacaaggttataagtgggtgggtgtgccactgtggagcaagggcatgattgactgaagcagcagcacctcaggctgcttagctgtttagtatctgtgcatgtgtgtgtgtgaataatttacatagctttccccagtgatcctcttccggtcattagaaattgttgagtaaaactgctttgctggcaacctgctgtccgcacttgtattactgaatgccctaggaaataataaaactctatttgtttaaggatatgctaattagagacttcacacgatttgacgttcatctcctaatttggatgatgctgttcctttggaagatgagtattgactttagagtttgggtctgagctaaatttagatgctagtccaattttgtccaatggctttgaattccacattgtatatactgagagatcatcactcacttctattgagcatctaatttagtggcttcttatggcccatttggagaaggaagaacaatggattttctggtattggtgaacaatgaacaatttttgcctttttcaatcacagtaatatatggtgaccttgactccttgtcttctaaagtatgggaaatgtttagtggagttataatgctaggtttcttacagtagcctgccttttggaaggagtggtagaaaagttaagactctatgtgtgcaccatagcatccaaaatccaattgttaagacatctgatgaaccagaacacagtgtccccaagctgtggaggattatagagagtttaccatatttggggagcagttgtcaccagtttttacccagccagccaatgatactactgggatatattataatgagatagacatattggaaggaagccctgaataaatgagctacacttaatgctcaaaaagaaaggagagctggatttcttgatttacgggtggcagattttgacctaggaaaaacatattccatatgtctttaaattgaaaaaaatcactccttatagagattcctccaggaagatgcctctatgaagagttttacccaagttcttagcatttcagagctcaccaattaactcttttcccaggctgggtggttggggttataactcttaagataaaaaatggtaaaattggagataatggcttggcaatggagggatcagcagtaaattatcaaaaggagaaaaataagatttgaaaaatgtagcagctatgaaatatcattactagaaacagtttaagagcatggtgatgcttaccctcagcagtcttatcttttcaaaggctgcaatctcatattctcccctgctagggtagattggcatttttgattacagtaaagaaaaatgtgcctggaaatcagacctgacagaacatcatgttcttccaggggtatttttgtagacaatgcttatttaattttgatttcagaattgttttgtggtacatctcattctgatacatggttgtttaaaattcatgtcaatgtctacgtaatttaaaaatgaattgataacatttggaaacagaagaaccttaaaggaaaggaagaactaatggtgagagaaaagaattgagggcacattaataccagtcatctgcacatgaaatatcagttgttgactgggcgcggtggctcacacctgtaatcccagcactttgggaggccaaggtgggtggatcacctgaggtggggagttccagaccagcctgaccaacacggagaaaccccatctctactaaaattacaaaattagccgggcgcggtggtggtgcatgcctgtaatcccagctactcaggaggctgaggcaggagaatcgtttgaacccaggaggcggaggttgcagtgagccaagatcacgccactgcactccagcctgggcaacgagagcaaaaccctgtctcaaaaaaaagaaaagaaaagaaaagaaatatcaggtgtcttttctgggtgcatttctctgccgaatcatcatgaatcagcagcactcatggtgcaaagggcactgaacacagagtgcccgacaacaccattggtggctgtggctttcaaggtcctgccctgctagtggctatttgaccttagccaagtcacgggtcttgttgaggttccatttcttcatctgtgaaatgggcaaagattccctccaactcaaaaattttatgatctgtggtgtgatttatgtgactaaaattctctgcctgggaataactatactagtgacagaactgagcttttctgtggtgaaggatgggtgatgggttgccttcacctatttccagtgaacactggctgtcctccttgttaactcccagatggcaacttccgattaattggccttgcctccttgtctataaagtgttctctggtgtgtttcatcctccactctccccagtgttctatgcagtatttaaatctttcagaagttatcttctttaagaaaaacttattggaaaaaaaaacagatggaagaagaagtcatagattaagaggcttacaagatatctcaaccaatcaccatgtgttaaccttatttgtatcctgattcaaacaagctgattgtaaatataaaaaacagtgacatgtaagagacgattggaagtttgaacacttggtagatgttggatcttaatttattggtcattattttaggtgtcataatggtatgatagctatgtttttaaaagaatccttatcttttaggggcacataccgaaatatttgcagatgaggatgatgtgattctggtgggcagccaatgagtggggatacagaggaagcaagtttgaccctgaattgataatcactggagcagaatgacggggacacagaggttagtgatactactgggtctgtttttgtgtaagtctgataggttccatcaaaagaagtgtaaaataaccaaaaggcttaacggggactcatccttgccagcacatttgccgaggagtgggcaagtgctgcctgtcgcagttgtataatcgctgggggtaaatgtggaagttcgtcaatcagcaaggccgtagtgggggctgactggcagcaagcccagcgctgcgtggctgtcatcttgcctcgaggcccatttgccctctataaataacagtctatatgaatgctttactattttaacacacatgggccacagctgctgagcacgtttgtttacgtagctatgaaaccttctgtaaacaccactatctcaaaatcgcccatgtgtcaggaacataaacggccccctttaaaaatatatctgcagatgagacacagccaactcctagatgtctgagtggctggtgtcagaattttccagggtttgattcattttcaaaaatagaaccacatgactggaaggttcttgaaaggtcgcctggcatgtccctcctgacttcaggcgggaccaggccaaagccattcacaaaggactcggggctgttctgcgtgggcatgggtctgtcttttgtgcagtcccttcaaggccatgaaaggggggctcgcttccagccttcaaggagcccactttcgttttctaaaaatggaacctgaccctgcaatgcggctggcattggaaggcagtgcatccacagagcaccactcgcctgcaccgggcctgagctcccagcagacggaaggacccaggtggcctcctgtgggacaactccggtctccggaaaacaccacgctgggatcatcctgtgcccaggatgcctgcttcctaacagggaagagggcaccgcgtgaaggtggccatgtgggccttccctcctccctggaagaggcctgctcgtggagaccactgagcacagcaggttaaggtcaactgcgacattgttgaaagaagtgatgagcgcaggggaagctgttttgtgtcagcttgctattatcacggctcctgatttccagtccagcactacaatgaataattagatccctgtgaatttgttttcctcgagtgtgcatttggtccacatttttttttcctgtggttttgagagattgaagcatttttctcccctaagggcctgtttaatgcccataaatcctaattgagcttttcattcacaaagaaacagtatcctgctgaagcgtaagagagcagctgtgctgggggtactgagttgtatgattcccctgaggaaaagaccaagacacttccagtttccagacacctccagaactttctagaaccccccccccaagtctagaaattagaagactattttttaaaagaaaatgagtagcagttgccttttcccagggatggggtgagcgtttggattgattttgctggtaattactcagatttctctatgaaagctgtagaaaggccatagggtgctcagaggcaagtatcactgttaattaccaagaaaaccatattcctccctttggaaaggctcactcattaccagctgtcatcagaaagccagggcctgccccagggagaattctgactcagggacatcacaaagataatttgcttattccagattcatttattttacagagattgggctctggtttgagggaacacaaagcttaactcccacaatttaaagctcagactagcatcagtaaccagagggtacgtctccagtggtttttgcttcttgagcttggagacactgccctctctcatgtcctcttgggggaatttatggtgaaaagggaaaagaaaaactgcatcctgagtggtcagttcatagtgtcagaggctgtagctctgtggccgctagggggatccagagtccctgtgctcagctgaggttggggaagtttctggtctgtaggaaagtgacagctccctgtttgaattatttctctttcctccctcctccccagcctcccctcctcctctctccctcctccctttctcttccctccctcctccccttctcctcctctccttcctccctttctcttccctccctcctcctccctccctcctccccttctcctcctcttcttcctccctttctcttccctccctcctcccctcctcctctctccctcctcttccctccctcctccccttctcctcctctccttcctccctttctcttccctccttcctccccttctcctcctctccttcctccctttctcttccctccttcctccccttctcctcctctccttcctccccttcctcctcccctgccttcccttctacttctcccttctatctcccttcctcctccccacccaactattgccacacaaatgcacccccaaatcaggctcaaggtacagatagtcctgttaacacctggagcacttatgtcttattttgcaacagtgacttttgttattctttaaagctactttccgattaggttcctgtgccttttgttctatggaaaggagaccgctcctaccattgagctccatgcaaagccctttactcacgttttcactgtttgctgcatttaaaaaccctatagcaaaagtttcacaccaccaccgtaaaagaaatttgtgagaggttgtgaccttgcctgttgggtacagggaggtagaaacatgggacccatggcttttccctaaaagggatcacaggattaagttacttgtcacaggttgatgaagaacatggggccagcctgctggtcatgcaatttcagacaatataaaccacctgaatctcaagctgaagacttaaaagcgtaaaagggctgatggtatcaggaaaaaggaccccaaagacactattactacctcaaagaacaataaagaccttaatgaattagggttctggtttatactttccccgtgaggcactatggttatcttgagtcctagctgatggctctgttttgggggatgttacatacaaacatgggcagaacctgctttgctgttgggatgtgtaacgtgcaaatttcagacatgagcgaagacgtcagtaaaaacagaccattttctctatttcctgaacagatcatcttccctaaaacatcccaatgattagccattaacagcaggagggccggcgggattaagatgaatggatcttcaacttttttcttttctgctagagttatttactgtgtctgcagctttatacttactgggagctcagcaggttgaatgtggagagatactaggcactcacttcatacaaaagaaaaaccaatgctataggccttataaatgactctcaaagaatgggtgaaattgcatttttattaaagcagtttgtcaggcttcctttgaaaggcttaacttcctccttctaacttggtaacaaataacctcaagtatttaaattagcaatgttttaaggccatttaaaacatgctttagagacagatcagagtttaatttaggtaaatatttggagacttaaaatatattacatggtgatttttcattgttcattaatttattttccaaagggctttaaaaaactaaatggttaggcttcttggtggatatacttcaggtgagacatgtaggcatactatgtcatgaagcaaggggatgttgtcaatattgagtgaggttcagtattctagatcttgtaatagataagaacatcaggtccagtttaaaatgagcatctatcccacagccatcccaggatagaacacatcttacctgtggcttccaccattccttctaggatgaccacaatttccagttcctctttgggcagctgggctttggagatctcccagaaaggactctgttggttaatttcatggctaatgatcagcggtgacaccagaaacagacggtcatcccccgtgtaataccctacgttgatatccgtctggttcaacgggatgaactccccctccgaggtctgtttggatttgatcaacttggctctgatggaagcctccacaatgtgggaattcctaaggtcccctacccggaacatcaggcacagtttcccatcccgcatggagatcactgcatgggtggaaaagaccagggtctctgccctcttcttgggttgagagatttttacaaacatgcatcccaccatgaatgcattgacaatggaccccaacacagattggattaagagaagaataattccctctgggcatttatctgtgatgacccggtagccataaccaatggtggtttctgtctctattgagaataaaaaagcagagacgaacccgttgaggttggtaacacaaggagtccaggaggggtcctctatgtggtccatgtctccccgtatgtatgcgatcaaccaccagatcattccaaaaaagagccaggtcactgtgtaaaccatgacaaaaatcaataggttgaatctccacttcaggtccactaatgtggtgaagatatcggtcaggtagcgataggtctccctcacgttgccgtgatgaacattgcactttccgtctttcctcacgtacctctggattttccttttggtccgatctcggctgatgtgtcttggcaggtcatccctggcctgcttaggcaactttggctggtgaatggccactgggctttcgacgtcctgatccatggagtcgccctccaggacgttagctggtggtttggagaaaagaaaagaaacactgaatgaaaggctggctctttgaggacaatggaacggcacactttgtatgggctggtgaaaccaaataccatttgtgtagctataaacaaagtagacaaagccatttttattccacaccatctggataggcctctagttgacttggacttctgtgctcttcgatctagtttgtgtaagtacttcaccatcctgcccaccaggacggagcttattgctgcaaaattgtgtccctgccagcaggttctactgagtcagctctcacagagggatgcctcccaactctgagatgctgtggcatgggagaggcagtaagctctgatgaaggagtcctctttagattcagacaggcttagctctactacttagcaactcttagtgggctcttggccatgatatctgttatggactgtattgtgtcctcaccaaatccatatggggcttgagccccaacccctaaggtgacagtattgggagataaggcctttaaggagatagttaaaggttatatgaggccatagggttggggctccaatctaataggactggtatccttatgcgaagagggagagacaccaggggtgcacacaaacagaggaaaagccatatgagacacagggagaaggtggccatctgcaaaccaaggagagagggctcccagaaactaaccctgccaacaccttgatcttgaactccagcctccagaacgatgagaaaataaatgtccattgtttaagccacccattctgtgatattttattatggcagcctgaactgacttacaacacactatccaaattcgtgagcctcagtttcctcatttacaaaattgatcatgatacccaactcacagtgttgttataaggttaaacaaaaccatgtatgtgatctgtgcctgcatgtaacagacttgcaatcaatatttttttgtaataaattgttcccttgtcactttccttatgtttagggcaagagtcttgaacaagctctttgaactattggccaaatttcagggtttaaaaaacatttctggtttttgtcggtaagtatgcatgcattgtactttaatggttgattcaatgccaaggtaagtaaaaaagggtggggaaatgttctctctgtctgtgtgcttacatatttgatttggtttctgcctcctcaacattcaacatctgtaattttagcttgtggttattttttttcttttaaaaaagtttaaatttttttttttttttttagagatagggtctcgctctgccacccaggctagagtatagtggcaccatcatagctctctgcagccttgatctcctgggttcaagtgatcctcccacctcagcctcctgagtaggcacaggaggctcaggcttatgtcactatgcctggccaattattttattttcatggagacgggggtctcactatgttgctcagactggtcttgaactcctggtctcaagccatcctcacaccttggcctcccaaaatgctgggattacaagcatgaggcaccatgtctagttatgttgtttcttatggctttcatgattaatgcactggttcactcattagttaataatgcattaggaaagctctcctaaaacttgagtgcaggggaattttggaaccgatttctgctgtttaaaagcatataatccacttatgaaattatttatttggccaataatactaaagtcttctacaagtttggtaagaaatttcttcctccagacttaaattctgtgtcgtttgactctgccatgtgtttcctttatggacactctgtttttaatcttggttaaaggacaaatgtcatctctccacaaaccatcatttatctgaataagaacatagccggagatgggatttgagtgcccccaacctaacttatgagttaaccttgctcatggatgatcagttgccttaaaaatcaatctcctggatctgtttttgtgtttcagcctcaggaagagacagcatctgttctgcagagcctactctctagtctgacagctttgacttttagatgatctccctcagtagtccttcattgaaaataagaaaagtcattcatttgtaagaaaatttgcttttttccctttcttagaacaaataccaggataggtgttgatggggggctgttgaggttgggagggctggaggtggggtgggtgtatggatggaggcagaggccatgtccttctcactggagttagggtgggtgtgtggagggaggcaggggccatgtccttctcactggagatggggtgggtgtatggatggaggcaaaggccatgtccttctcactggaggtgggttgggatgtgtggagggaggcagaggccatggctttctcactgccgctaccccctacatggcagggtgttcttgtccttgaatggtcaacaactctgagctctcactgctaattttgtgctgagtggaagtctctaaatatgactttatatggaacggtgtctgggctcaaactgtgcctggctggggagaccttgtctgcagagccctgcgaagggtccagcaggcctggtgtatatcccgtcttgaccgctgggaggctgcccagctgtgcaaagccaccctaagctcttgtctttctgagtccttaagtgggagaagagggtttgtcaaattagctgattctcaagtcttcagtgatatatcatacttaaaaaatgttacaaaggaaatttattcctgcctcccctccatctccaatttgtaggctttatcccttttctgactaaactgcaaacccccagctccaggcaattgtcctgacctggaagaacctgttttgaaaggttaatgaatgagtagcgatcagtgctctggaaagtctggggggatatctgttactcccctaaaatccagttcctcccagggctggaccacatttctcatcctctttgcattgagggttggccatggtgattgagtcttggcccatctggagttgagtgtgtcttcctgggccattgtcctaaacagtggatgtgtcccctccttatgcctttgccccttctgtgggggacaatgaagtcaagaggtgaaggagcctggatcctgagtcatgggtggagagctgctatctatctgtctagaaaccagaaaagcaatgattgtgtttgacccattatatattttgtgtctgttttcaaattgagccttatctctaatgttgtgggaagaaatatatgacacctataagcagatagaagagtggtcagggggaatggttgtgggaaagagcaaagacagagaaaagaaagccgaagatgaatgtctgggtttagtgtttgtaatgaattagtctggggttaattaaatgcttgtgtttgttattaggggaagaaatgtaatgcaatgctacttcattgcctttaaaaaccaacaaaaagtaaacactgcatattctcataggtgggaattgaacaatgagaacacttggatgcagggcggggaacatcacacaccggtgcctgttagggggtgggggattgggggagggatagtattaggagaaatacctaatgtaaatgacaagttgatgggtgcagcacaccaacatggcacatgtatacctatgtaacaaacctgcacgttgtgcacaggtaccctagaacttaaagtataataataaaaaaaaaatacaataacaatgggaaacaaaaaaacaacaaaaatttcaaaacaaacagaaaaagccaaacctccctggtagtgtgtttggaaggtggctccggtgggtccctcccaggtgaggccgtgggtgcaggccaggtgcatccatggggagatggggagggaaggctgggccttgcatcatggcagctggtgggatgaacaggcatggagttgagagaaataaaaaaagccaaggaaatgtgagagttctgggagagaagagatgaaggaggagccccgaggggccaggaggaggagagggtgtggggtatggggtgggtgagagcaaaagaggggccagagcctcagggctgtgtccagagtcatcacagggaatggggctagggagagagggcgagtccaggtctgagcagggagcggcggctcagcactcactggcatgcatgcagatgttgcagggtaaatatagaaggaaatggtgatcacattttgtgacatttctttctttctcggaatcccaggtgtgaatttgagcgggggatctgaatcgcatctccaggagcattttgagctgctccgtagggcaagttgcagctgtggttgggagagcagacatttctcccatgttactgcacagctgatgacacaggcaacttcttaccaccaaggataatgtagagggggtacaccctctgttaaccatgaaatgctgcacaaatgtgcaaagggacccaaagaatggcgctgagaactttgatgatttacttgactttgagagtagcttttcaggattttggctcagagtaaatgtgggcctgtgtgaaggtcagtttttctcctcctctcttttgtttctttctccttctcttttagaaaaattatcaatttacatggaactagctaaggtacaaaatagcctcatgttgaaatttaatctgaaagaaataataataaatgacagagccacagctgggcggagccttgtcctcgaatcagtgggattgtgttgttgcatttcaggtacagctcttgttgcagggaagcctcccctggtggccctggtctgtagtagatgtttcttacatttcaagttgtatatgaattttgcaggtgaaacttccagtatccaagaaaacatacaaaaagtactttgagactttttaatgtcgtggggaaaacctagttgagaaaaacaggatagatctctaatgtacctgcaaagtcaaagattggaaggaaatacaccagatgtgaatgttaatagggcaattttgggtgggggggttcatgagtacttttaattttcttgttaaacaaacatttttgaaattttctagaatacatttatattacttttataattaaaaaaacaaattgccaaacaacacatcgagacactctagatacctgatttaagaaatgtatcacacaaagagctaaataatgataaagcacttgatctgaaggtatcccatcccatacagctgacaatttagaaactgagacatttgcttgacctgaatccaagaaaatcgtaactaaaccctacagggtccttattgggggtatgaattagaaggaaaaatgagaatgtatgcaagtttgaggcaacttgaggagtgaaacctataggacaagtcgagtcagctatccctgtaactgtccaggggaccttgaaggaggagggtgtccaggaggcctgggggctgggggcgctgtcacagtgagctaaggagaacgggacagatgtcatctttctcttgggtttaaccaagtgtcagttgtttgggcagtgcccttagtgacacagaagtgtggtttcttcctcatcaaaaatcacccccaacccacagaatgggagaaaacattttcttttcttttttttttttttttgagacggagtctcgctctgtcgcccaggccggactgcggactgcagtggcgcaatctcggctcactgcaagctccgcttcccgggttcacgccattctcctgcctcagcctcccgagtagctgggactacaggcgcccgccaccgcgcccggctaattttttgtatttttagtagagacggggtttcaccttgttagccaggatggtctcgatctcctgacctcatgatccacccgcctcggcctcccaaagtgctgggattacaggcgtgagccaccgcgcccggccgagaaaacattttctagtcatacatctgataagggactgggatccagaatatataaagaactcttacaccttaacaaaaaataaacaacccattcagaaatgggcaaaggacttgaatagacatctctccaaagaagatatccaaatggccaataaacaaatgaaaagaaattcttcattgctagtcattagaaaaatgcaaatcaaagccataatgagataccacttcacatctattagatggttattattttaaaaaaagaaaatagcaagtgttggcaggatgtagagaaattggaatgctggtatatcactggtgggagtgtaaaacagtgcagctgctatgaaaaacagtatcttagtccctcaaaaagttaaacatagaattaccatgtaatccagcaattgcacttctaggaaacccaaagggattgaaagcaggggctcaaacagatacttgcacaccagtgttcatactagcattctccacagcagtgaaaaggtgaatacaactgttgcgtcaagaaatgaatcgctaaacaaaatgtggtatgtacatacaatggattattactcagccttaaaaaggaaggagattctgatatatgctacaacatgggtgaaccttgaagacattatttaaatgaaataaaccagacacaaaaggacaaacatatggaaggaaattctgatacaggctacaacatggcctcattggaaatagatttccgccggttggaagtaagttaaaacactgtggaaacagagatcagagaaaggggcactggggagggtatgggcaacattacatttcaatttgtcttgggtgtagagcaggatgggttagcccaaggtaatggtgagtatgtgcttgcttcctgatggacaaagactgggatggtggggcatctgaaaagcaagcacaggaagtcctagccagagcaatcaggcaagggaaagaaataaagtacatccaaataggaagagaagaagtaaaatgatctctctttgctgataatatgattctatacctaaaaaatactaaagactctgccaaaaggctcctggaactgataaacaacttcggtagagtttcaggatgcaaaaatcaatgtacaaaaatcagtgtcatttctatacactaataatgttcaagctgagagctgaatcaagaataaaatcccacttatcatagccacacaaaaataaaacacctaggaatatatctaaccaaggaggtgaatgatctctacaagaactacaaaacactgtggaaagaaatcagagatgacacaaatggaaaaacatcccatgctcatggactggaagaatcaatatcattaaaacagccatattgcccaaagcaatctacagattcaatgctattcctatgaaactaccaatgtcatttttcacagatttataaaaactgttctaaaattcatatggaaccaaaaaacctgaatagctaaagcaatcgtaggcaaaaagtacaaagccagaagcatcacattatctgacttcaaactacactataaggctacagtaaccaaaacagcacggtactggtacaaaaacagacacatagaccaatgcaacagaacagagaactcagcaataaagccacatacctatagccatctgatctttgacaaggttgacaaaaataagcagtggggaaaggactttctatttaataatggtactgggatagctggctagccatgtgcagaagaatgaaattcaatccctacctttcaccatatacaaagattaactcaatatagattaaaagtttaaatgtaagacctcaaactataagaatcctaggaggaaacctaggaaacaccattctggacatcagccttcggaaagaatatatgactacgtcccttgaaaacaattgcaacaagtcaaaagttgatacgcaggccctaattaaactaaagagcctctgtacagcaaaacaaactatcaacagggtaaacagacaaccaaggtaatgggagataatattggcaaactgcatctgactaaggtgtaatatccaaaatctaaaaggaatttaatttaacaaggaaaaaacaaccccattaacaagtgggcaacagacataaacagacttctcaaaagaagacatacaagtggtcaacaaacatatgaaaaaatgtttaacatctccgatcatcagagaaatgcaaatgaaagccgcagtgagataccttctcacaccagtcagaatggctattattaaaaagtcaaaaaacaacagatgcttgtgaggctgtggagaaaagggaaacttatatactgttggtggaaatataaattagtttagccacggtggaaagcaatttggagatttctcaaagaactcagagctgccattcaacccagcaatcccactactgaatatattcctaaaggaaaataaattcttctaccaagaagatacatgcatttgtatgttcatcgcagcattattcacaaagagtaaagacatggaatcaacctaggtgcccatcattggtggactggttaaagaaaatgtggtacaatacaccatggaatactacacagccatgaaaagaatgaaatcacatcctttgcagcatagtaggtggaggtcattatcccaagtgaattaacgcaggaacagaaaaccaaatactgtatgttctcacttatgagtaggagctaaacactgaggattaatggatgtaaagatagcattgggaaacactggggactactagaggggagaaggagggacgggctcaagggttgaaaacctattggtactacgttcactaaatgtgtgacagaatgctgtactccaaacctcagcatcaagcaatatgcccatgtaacaatcctgcacacgtactccttgaatctaaaatacaaattgactgatagaaaacaaataaaaaaaaaaaagaaaagcaagaacagcatgtgtaaaagtctttaaaggcatgaaacaactttggttgggagtggcacagattctgcactgctggtatgcggtgtgcgtggaggaaatgaaggggaatgggaaatgagaaaagagaggtggatgaagcccacgctgggccctgaagtcctctgtgctagactaaggagattgtttttaaactggggagtgatatgattgagtattttgagtgttttagaaaggtctctgaagagcagtggtatggagtatagattagatgcaagggtcggcaagcattctgtaaagagccagacggtaaatacttttgcttagtcaatgtgttgctttcaggaaacacaggtctctgttgcatattaaaaaaaaaaactttttacaacccttacaacacgcacaactattactaggttttagctcatgggtaacacaggaagcgtctgcagtctggctttgagtcactgggcagtcggttgttgaagggtgcctgtaggaaggagaaatggccaggtgctgaaataaggaggcagccatgggagtgaagagatggcagtggatttggggctaagaagtagaactgatttaagttggagactagtgagtgtggaggggagtgggcaggagaatgacccaatggcggttgggtagtatggtggtcgagacaggaagaatggattttggatggcagaggatcatgttcgtttgggcatattcagtttaaagtatctgcagacattcaggtgagttctcctgtaggcaaccaggtgtgtggggctagagctgagggcgacctggacctggagcagttgcagaggaagcatttctcaagggcattattcactgcaggctgtgggacaactgattgccctcctggaaaaaaaatgatgagtcttctccttattccttttattagaataaattctaaagagatcaaggatttaaaggcaaaaaataaaactacagaagtgtaagatgtcttaaaaaaaattctaagatttaggcaggcctttttttaaccatgacagaaatccagaaactattttaaaagaatatttctgacaatgtaaaaattgtaaatgtctattaaaaaaacaggaaaaatatttacaacacgacacatatatattcccagtttacaaaagcaataaataccccaacagaaaaaaatggtcaaaggaaataaatgaggagtttctgatagaaggaatatggatcatgagatcagaagttccagaccaacctggccaacatagtgaaaccctgtctctattaaaaatacaaaaattagctgggcatggtggtgcgtgctggtaatcccagctacttaggaggctgaggcaagagaatcgcttgaacctgggaggcagaggttgcagtgagccgagatcacgccactgaactccagcctgggcaatagagcaagactctgtcttaaaaaaagtagctagaaaacatataaaaagactgtccatccatggcaaaggaaagcaatacaaataagataaactttgttaccctaagattcgcaaaattttaaataaatgacaaatgagtatgtgaaaggtgtgtgttgggagaggaagtgtaatttcatacttgtatgtattatgtgtaatagcacagtctttccggaaggaagggtaagagtaggtatcacaatttagaaatgaaaattcaccttggactgacaattgagggtcatttattctaaggaattaacataacaaatattcataaattgtatgcagggatgtagtacagcctcttttataatagtgaaaaatcagaaacaacccaaatgtctatcaccagagcattggttaaacatactgctgcagatataatcaatggaataccatgcagtcattaaaaattatttttcaacattttgggatcttcaactctttgcaaagattatcttttcaatgaagcttgcatttatttatttgttttttgtttttttgagatggagtttcactcttgtcacccaggctggggtgcaatggagtgaactcagctcactgcaacctctgcctcccgggttcaagcaattctcctgcttcagcctcccaagtagctgggactacaggtgcatgccaccatgcctggctaatttttgtatttttagtagagatggggtttcaccatgttggccaggctggtgttgaactcctgacctcaggtgatccacccccctcgtccttccaaagtgctgggattacaggtgtgagccaccacacctggccaggcttacatttaaaatctcatccattacctcccagtactcatggtcatccttccttgttttactgttttctttttctgtcgtgtttttcaccttccaatatggtagatgttattgttttcatttttaattgtctgttggctcttgtcagaaggtacattccaggagtgtagggatctctttctgttttattcactgctagagctcaggccctggaaaaagcacgtggtacatggagtagggccacagcacttatttattgaatgagtgggtgtatgtttattgacctggcaaattgtccatgccacagcattaagagaagcagcagcataagaaacatatggtctactttgcaaatattgccatcttacagtaatgtgtgcatgtttgtgaatgtgtgtgtatgtgtgtgtgtaaagaatgaatgttctccaaagtataaattttgattaatctctgagttgtaagtttctgtgggtgtctttgctttctcttttaattcttctatttaaaaatttcccctaatatgcttctaccatctaaagaaccagtaggaaacataaatctatttctattttgaataaccaaaacaaatgctgcatagagctactgggagctgtccattggacttggcaatagggattcactagtgttgtggattgaagggttcccctccaaagttcgtatctaccccaaacctcagaaggtgaccttatatggaaatagggtctttgcagatataaataaggtaggggtcaatatatgatcatatggaattaaggtgggctctaagtccaattagatgtcctcataagagacgagcagaattcacagggacatggagaagcagccagataaagacagaggcagagactgcagagatgtggtctcaagccaaggaacacccggagccaacagaagctggaagaggcaaggaaagattctccctttgagcttttggagggagggtggcctgctgacacctcgactttggactctgacctctagattatgagaggataagtctcttttgttttaagctgcccagttcatggtatttgttatggcaacccctggaaactaatagtaggggtgactttggtgatggtggtgttggtggagtggtggggtctaaggcagattgcagtgggttaaggagtgactcacctgtgagggagtgagggacggtgagtgtagatgaagtatttaaaggcagagagagctggaggggagctgaatggagtgaggactcacgtgtgtgtgtgtgtgtgcatggatgtgtgtgcatgtgtgcacatgtgtcatgggtgtatatgtgaactgggggagttttgaatacttttacatgttgagaaggagccaaaagggtttaggttgatgttataaggaagagggagagccggttataaggaagagggatagtcgggtgtttgatagaatagaagtcaagacaaaatgctgctgagacctctggtaggagggtaggctcaaatggaaaaagtgatgaacttcatcccagagtggtggcgaatatttgggaggaacggagaaagatgggggagaaacagaaccttggagacagttctcttagggtttgtatcacaaacaagcctcaaactggctcatttttgagtgtgaatttcaagaatgctctatttcagttgattcattgaattgaatctgcatctagcaacaacaacaacaacaacaaactgaactcagcataatcacagatcaagcaaagccttctgcatcttgactggtcaagaaaggcatatataaatgagtatttgtatatccatgttcatagcagcgttattcacagtggccaaaaggtggtagcaattcgagtgtccatcaacagaaaaatggataaacaaaatgtgttctatccatacagtggagtattattcagccttgaaaaggaagaaaattctaacacatgctcccacatgggtgaagcttgaggacattatgctcagtgaaataagccagacacgaaaggacaagtactatatgatttcacttacgtgaggttcctagaatagccaaattcatagagacaaagcagaatggtgattgccaggggctggagcagggggattggggagttaatgtgtaatggggacagtttctgtttgggaagatgaagagttctggaaatggatggtatttccatttaccttgaatgtatcattgaagtgtgcgctttaagaatcgttaaaatgataaattttatgttaggtatattttaccacaatgaaaaggagattgtgcttaaacacagaaagcataaatatatttaaaatgagagatcagcttgtgactgcattcttgtctcattgcaggaagagcttacaaagagctacgatgctatagctccagactgaaaaatggtgggattttgccatcatattgattcctgcgatcttggatttataaccagttactagttagtgatgcctctgggtaggtatgtgtgtgtgtgtgtgtgtatatatatatatgtttgaattgcaaagcagatgtagagaaaagcgtatggagagagacgcttccattttatgacctagacacatgtgagagataattcagagctgtagttacaagtggaaccagaagttcaaaatcagtagtttccttttggtcccttgccctgatgtttatcctttggcataagtccttatctgaagtcttgcccatcagcgactggtgataacacttgtcatttgtgtctgtgttgtcatgtgaaggtgagctggttttgatttgctgtgtcccttgagctgttgtgactaggggagactattctaatcagaattccagacagaccagaaagtttgaagtcataggtgtatgtggtagaacagatcctacatcccatgaggacctggtgacagcttctaaagggtaaagggtcctattagcattttagcttggggaccccacaatgtgaatttaaatttagaatgtctagtacccactgcaaggtcaaaacactgatgttggctgcccatggcatatggctgggtaaaatgtgcaatttcattgcttaaaggagataaacgccacgtcactctgggctggataaaggagacagatattcaataccctgattcttcttctttttgggggggggggcagggtctcactctgtcacccaggctggagtgcagtggtgcgatcacagctcactgtagcctcaaccttctgggcccaagcaatcctcccacctcagccccctaagtagctgggactataggcacgggccaccatgcctagctaatttttgtactttttgtagagacagggtcttgccatgatgctcaggctggtcgtgaactcctgagctcaagcgattcacccacctcaacctcccaaaatgttggcattataggcgtgagccaccatgcccagcccctgattcttctttaaagcgatttcaagaatcaggactgtctacagttagttagaaccattaagaacctgtcatgaccatcatgtacagcgatataggttgtccgctaacaaagatgcccagatgaggggagaaagagggtggaaacctagtcaatgcttcccctgccaagacacatgcccgttcatagggctgagtccacccagaggaaagggcacctgtggtaatttgcacaaaggcactgtatgggctagcagcagtcctgcaacctcagatgtcatttacttcatcctccttttttttagatgaacacatgaagaaagtgaggcccagggaagccaacagatttgccaggaggcagagctggagtgagctcccagaccttgggatcctaggctgtccgttcctccttctgtgtttccctgaagcagtggctgcttcaggctattgtcttgcccagggactgtggagttggtggtttccttctgagagcaagaagaaatctattgctcctgattcttccagtgtggagcttggagacagccagtcctggggaatcccagctctgctgcccaccagccaagggacccgcagccttaagtcttcatatgcaaaatagggtgaaatgtccaccttgctgggttgctgggagaatgaaatgacataatgaactttgggagcctggtgacaaggtgcttggctatagtgcctggtgggcctgggttggaatccagttctcccaactccaatctgcaagtatttgttcaggccacttctgcctcagagtctgtttcctcaactgcataatgaaaataataagacctaccttgaagagttactgtgagaaagaaaaaaatcctgcaaggatggcacctggtccacagcagccattgaacaaatgacagcaattatgatagtgtctgggtcgaagaaggtacacaatttgtaactacaataatcactatttttataagctcaacattgtcctggaaactgtgggaaatccagaaataatctaagaaacagatgggcagacccatctggaagctaagagcctgcttggtaacacaaaacctgcatagtgccccatatcaatgtgcagttgcattctacactgtggacaagaggccaagaatgttctagtgcatcagagacagaggccaacggtggctggactaattggcaaaggcatcacaaaggaggtgggaaattattgtggctctgatgtgtgaaagggaaaaagccaacccttactgaatatctattatgtgccaagtactgggcagggcacaacagcccacagggggagtattgacccgtcttacagatgaggcagtggaggtgcataaggttcagtcacttgctgaagcttacatgtctaatattcggtggggataggagattgaaccctccatcaagttggtcccattctgaagcttgtcttctttcctttctgccattgcagatagatgagagaagtgtgtgtgtgtgtgtgtgtgtgtgtgtttgtgtgcctgcatgtgtgtacaaggtgagaaaaagtggcaacaagaagaatcttgcctcactcctgtgttaatagagtaaattaccccagtggagcagaagaagtggaaataatggagtgaaagatttaaggggcttgtgtttgggatatgggtcaacactagagagaggatgctggggatggaggagaagggataaggctaatagagaaaaaaagactttctaagatttgatggcagattaagatctggtaagtgggaagatcctggtgtcttacaaaatcataagttgggaaggggaactcgcagctagggaataggatgaacatttattgaacacctactatgtgccggcattgagctttgtagcttcacatctgttttcagctttattccctccccttaataaatctgtgtggtaggcagcatcattgatctgagagaggctggctaccttgcccaaggttacacagctgcaattgggtttggtcttgggtgattgctctaagtctagggtactttttattaaccaaacagcacagaagcatgaaacacccaagggtgctgagcagacagatgggctgtctcagaggatgagagtatagagcaacaatcaagaatcgagaccaccagatacttcaggaagcatccacagatagtgctcaggaggagcagagggtgcaggcagtgagaaggcggaggagttagtggaaatgagggggctctgctgataagaagagtccaggatgaggaggccaaggtggtgcattcagcaagggagaggcccttcctagcaaggaaggaaactcccagagactctgaatagggtggtcaggatggaagttcgactgcagggacagagggtgatgatggctgaagctgcaagacacactcatcttagatgaggaagggagatggcagcgtggctggggaaaacaagcatgacacctagttttccaaacgagggaggggaagcaaccagtagaaatgaagcagtgggacattctagagggaaagcaagaacaagatctcccagggattgggaagaaacagaatgaaggtcaaagcgttgccctcagagagaagatgggcccctccctgtctgagagacacaatgccaggcacagcagggtgtgtggggctggccagactggtcacccctgctcagaatgtgacagttgttccagtctttccaatggattgtggtcacctatcctggagtgtccataaattagatcagacttttcagtcttgaagaggggcagagagaagcgagaaagtgattgcttggttttcccactccagttaagacacaagtcgccctctcttagattccagaattgtggaaagccaaatcttctaaaaaggtctggtgagctttagagtgaggaacggggaagctatttcggaagaactagtctctgcatgactgatgggcaggacgtttcctcgtcaattttctggggcaagaccgatttggatttgctttgattccaccacgtcatgggttctcacgacagaggaaagaatagtcaatccaaaccctcacattagccggagttccaattttagacagatgttccaacccacttcccacaaacccgcttctcttaagaattctagcaagtggaaaattgaatttcattttctctgctgtccctctcctggggatgacagaaactgggttttgaaggagaaaaaagggtcccaggtaattcacccagagcagtgaccacatagttgagggttaagaacaaactgatccccacaactcaacacctgttgggtagctccacctggtaccagcaagaaaagggggggctggcaagcaagcattcaagggtattttccctgctctaacaaggtatgtttaattctacaagaaaactgttatttctctgcatcattttccctcttgacttcacctttaatgcacactctatagacgtcctgttgtttaactttgtgcttgcagttaagtgttagcattttgaacaaattaatgctgacttcctcttttcctataaaggctgcaccctctggatgtatttcagtgattatactaattcctgcatcaataaaatagaattacttttacttaaacgtggcttaaattcctggcgatacttgagtggaatgcaaaaggcctatgttttgcacttcattgcatctgtgttgttctggagaaatctgccgttggtatttcgggggtcttttgaagaggagtctgctctctgtaatcattgccatgttttatttgagctctcggagatgggcatttcctttgcctgggttttgtggaggagacatgcactaactagatttggggtttcaaagactcaggtcctcagataatcacttggtacctgttctttggccagtggccaaacatctccgcatctcagcatctttcttctagggactgttggtcaacagcttatgctaccaacttctaccctgaaaaatattcacttttttagggttttttaggataaaataagaaatttcttttaaaagaaagcttgatgtgtctttgaatggtctgatgcattgaataaattgcatgtcctttttctagaaagcaaatgaaataattttagttaaaaggtttcataaggcaggtttcggttgatgggagcgcaatgtctccctgtatggtcacatacacgactgtgttttgtgagtgttgcatttccccaggtttcagagaagaaaatgattcttttcctccatgggtcagacatgtaggtgtagttcttctctcagcctctgccttcatttctcagacaacttggtttcctgtgaaccaggcacatgcatgttcttcaaaatggccctggattgaagcaggccaccagtttccatttagccttagctgaatgagaagatgttcagtcctgccagcttcattatcagcaggtctcttgcattttaagtgtttttctcaatttgtttgagtcatcctgttgtgtaccctgaggctttgaggtaccagaagacggaggttgaaatctttacagtagatgtgggctcctacctttctattgtgtcaggttctaggaatatcatttttcttctcaaaatgacttcactagcggggagaaaccagctggtttttttcctggtaggggtggcttgaagatgctcccacgggggaggaattgaggggcttgtgactttgtgcatggatctctgctctactagtttgtgcaaagtggagattgtgcagaccctaaaatgttgtacagaggagagcccagtctaagggttctatagcggagagagcaccagcgaggagttcttggatccagtgggccccctccaatcccaggaagcctctataaattgatctgtcttaacaaaaagcctcaatttgtagcatttgtcaatttttgtggtgtacaagctcccaccatggctgactgcaaactatcacctgttgaccagctcacaacattcccgctatttaacgatcagctgtcatgagctgatacgagctcactgcagcacctccactgaaacaagtcctacatccttgcagtgggggtgaagggatcctattttgctggaaggtggtgggaaggagggggtgacatggaagggaaataaagggatgcaggtttgggaaaggttgcccactctgtctccctcttggagagttctagaacaagtgagcctattaagggctctgagaaatcctatgattgatatatataattgcttaaatgtgctttcccaaactcatttgagcttaggataacctacgcacatcttggttctgtggaacgtatttgatatttggtttggcggctcctggaatgaatgacaggaacgttggagatgggcacacccccactatgccttcttcacgattcgctcagggccagcccagcatgtccccgtttccacctgacacagcccaaagctgtcagcccaagcattcactgtcagcatcccctattgtcctcagcgtgcaccgactcccgctcccttccccttgcctcagtagaaagagacatgactcagtcaaccagcaacaagcaaaaaggagagtgacatattacccaaacagaggaagattctctgacacaatgggaggttagcttagactctgttgctagactcagagggtaagatgaaagtaaaggttctaaaatagaatcctatcaccagaaacggggacagcctgaggctgggattacctacagaccacccacggcgctttcaccttcacccactccagtttttccctatgggtttgcaaatggaatcattccatattcgagtgcggtgctgctcctccagctgccaggaagcccccaaacctcagcactgtaggctctgaatgtgttctgcatttatccctcctccagcccttctcactgaagctctcagcttggtgaatgatgacttggcaactagggaggtcggggccagggccagtgtagtatccacattgggctccaccccatagactccatgcaagccccctgaccttcccttgagagtgatgtgtatgggctgtgggaggaaggggtgtgtaaagcctgtgactttgcttggtggaaacccacagctggaggcagaggacacagggacacctgctctgaatgaggcctggagcagccacttggaggatgctgaaggcacagctcccacctctacggcagctgtggcagtggcagtggcagctggggcagagctggggagaattattaggggagaaagaaacacaatcaaacggccttccttgaaaggtttcctaagggaagagagcctggggtatggagccccatctatgggatgagccattgggaagcacatggggtcagcactctgagaataatggagaattctccccctccgggctctgactttttcggtagcacagacttgggtgaacttcaggtggagtctatagtaaagtgcagcctaggggcttggctcaaaacagatgagctgaaacgtacatacctgatggctcaagcacaggcttggagccccatctctgccattttggtcccataacttctaccaggcacctcctgtgtaccgagccctgtgctaggccctggggatgcaaagaccaataaaacacaaatccctgccaggggaactcagggttcttttgtggcttaaaactggtctgagtctgggggtgagggtggggtggggtaggagacatttttttggaatgaaataagacatcctcttaaacactgttttggagttgggagtcactgctttatgagcatgggctttccttttggggtaatgagaatgttttggaacatgatggagttgttggctgcacaacatcatcaatgtactaaatgcctctgaaatgcactcttgtaaatggttaatttcacctgagaaaagagaagttgcttttgatggtaaaactctagaagtccaacacctctggaaggtcatgtgtcttcatctgcctaagcctgagaaccaggggtgtgcagggtagacatctgagagataaagcatggtggcatgtccatccagggccagtgtcccgatggggagatggagagagggaggcacaatgcaggggactcctccatgagcctgggcagcctacatcccagccctgttaaggtactgttcacctctgcagcctgcagcgctgacaaccatgcttgaggccaggttggaacatctggcaagccattaatacctggtgactgtgatgaatgcctatgagctccaactgacttcagcatttcacggtcaccctcctggaggcaccgtccttaataatacttttatgcaacttagacacgagttgctgcgctgggctgttgcagttgactgggggacaatgtgatttttctcctgacatgagtttcctaacaaattacgttgggggcacgatgcttttccttttgtgagattggactttctcttttattgtgtgatgttcttttcctgtgttgtactgatatgttacggggggatctgcagagcttctttacacagcacagcttgttttttctctgaggtcctcactgtgcatcagtgcccgatggcaagagaagacctgtttcatattgcctctctctgggtatatgtgctacaggagtacgtctcattaggggtcagagtggccagaagtaaactggatttgtgcttatcagtcatttattccttgaggtgattcctactttaacctgaactacttggtggattttcatcagacagtggaaatatttgcattttcctttttctctcagcttgggtggcagtgtttctcttgcaaaattagctgcatttgtaaagtgaagcagaacgaaagtcaagagggcgatttctctgttggcgtttgtttgtttatttttccaggatcatcttgctaaaaggaaaagttttcctagcaataaccttgcgatatctttaggcagctctgatcataattgatctgcagtcaagtcttccatcctggaaggaaaatatccggaaagaggacttgattcccttctgcccagtcatagtctatttagggtgaggcctgagtggtgtctggggacagggtttctggggacagagtctgagtcacaaagtctccctgctgattctctgctcaccaagccatgtactctggtttgggacagttgctgcacagaagggggcagattcctgcccgatgatcttgtataaccctgcagtggccccgtctaggaacccaaagacattctggttctatgtttgtagagtatattttaaggccacagtgaatgaacttggaaggagatagaaggatttgccattgagatgcctttttggtagacagcatgaaaactctgggcttctccctggggtcaaaccatgctctgcacctggccagctctccaggaagccaaggtggaatgatgggtttcaggacagtggtttctcatactttccagggctgtatttgtttaatgctcacactcttttttaacagtgagattttgagcacttttgagtctcggctcacacagacagccagcatgggccatggagacaggcagccctgggggccaactatggttccccatttggtgttctgtgtctcctggggatgacttattaatagctcatagattacaaacggcctgtacttccctgccctgtggcttgtctactgcaatgctgtttgggtttcatgcacttgggatatagtccttttaaaattacattttctcctgcttccatgcttctcccccctggggcccattggcaaagcctgtgtgctttgctgtgcctcccctgaattattcttgccttctccagcaaaggtttatttgatttctttaaagttacttgactgaattctcaacgcaagtacatacactaaagtaatcacatctgctcttttttagggaaaagtagaaatctgcactcttgtctcgactttgccttgcctgcagaactcaacatttgcgaatgatgtgtccttgagaagtcatgttttacccagttttgcaaacttttggctcatatcataaattcaaagatgctggtgctcccagtcttagtgctaacatttctatttatacccctttccctgagccccaagaaatgttctttaaacatattctcagctggaccagaagagatttggtttgtgtgtttgtttttaatgggccctgcattgacttggataatgctgttgaaaacacagtaagatggattaagtgctggataattctccttctagcaccaatactccctaataactttttgatacatacaaacaaaaacatcctctttaatctgcaaattcctctttggatgggctgaagggtaaggttatctggaaaaaatgagtaacttcggcagagagaatcctgtgtcagtcaccagaggagaagagagaaagctgcttgtctcttgcagacctgtgctggccaatacagcagctaccagcctgaaatttgcctggtctgaatagagatgtgcagtaagtgttaaacacacaggggatttttgaagagtaataatgtaaaagtaaactatcccattaataattgtcataccaattacatgttgagcttttaatatctggatatagtgggtgaaataaaatatatcattattttaatttcacctatttcttttttcctttcaaaggttcatattatagaatttaagattatgcaggtggctggcattatatttccactgggcagggctgttacagaacatccagtactgaggaacgccagctcttagcatgttgggaataaaattgatgcaaaaggcagtcccttggttggcttaagtcagaagaaaagggctgcttattaggggggtttaaccttttgatgtggaaggagctgagggctctgtaattgggaaaaaattaataagagttcataatgtgatataataaggggtattgaacacaactaatcaaaaaatggttggggaattgctgataaacgtgtgtaaatatgttccctcctagtttgggagctgtggctactttagcccgctggttcaattgtttttcatttttttgagtgctatgcaagctcgtgtcagctttctgcacaccactaataacccaatttgtgcctgattggagaagcttgacattgacagtatcttatgttgatgccatgcatgatggggtgaggagggagagagggagaaaagctcctggaaaaacgggcatttacaaatgggaaaagtgaactgggagagggcagtgtaccattggcttgggtaaatattcattttatttatttatttaaaaattttggttcatgaacaattctttaggtttgaaaaaaaaaaagatcaggtgttgttatccagggctgaagaaatgaatcatggtcccagctttgaagcacctgtggcaacattgccagtctccctgttctttcctgctaagcccatgactccagtgtggcttgtggaggaagctcactgggactattttaaaacgtgtgcccaaggaagtgcaaatgctgtgcccagcactactacaaaccagtagctcttgtaaaccaaaaacaaaatttgaacgccccccaaccatctgagtggacttcttccttggccagggctctcctaaaatttaacctgagagactggttcaggccattatggtaagtggggattggacacgccttattatacctctctggcattaacatcaacacagacccgaagtctgataagaatcggttacaatctactctctctgaagcctgcaacctggaggcttcagctgcatgataaaactttggtctccacatctcttatcgcaacctagacattacctttctattgatcccaggtctttagataaactcaacccattgtcgactagaaaacattctaaatctacctataaactggaactaacaacccccctcctttgagttgtcccgcctttctggactgaaccaatgtatttctgaaatgtatttgattgaagtctcatgtctccctaaaatgtatcaaaccaagctgcaccctgaccaccttgggcacatacatgttctcaggacctcctgagggctgtgtcactcatatttggctcagaataaatctcttcaaatattttacagagtttgactcttttcattgacattcttctgccattcccctgttcctggaggctcaaggaccataaacttgaatagcatgatttggctttggtttgagcctatgcctttaggtttagatctttgcctaattgactagtagactttgctgctaaaaagcatgactgcaaatctgataaacactccagcttttgcctttagatctctgaccaattctccttctcagtgacttttcctgacttcctcttctgtctgtccccttgaatgttgggggtaccccatggtttgtcttcagcctctttttcttctcatccctcactgtttcttggggaaaggtctcctgtggatgaagcgctccctatatgtagatgacttcctcatctagctctccaggtcagatctttctttccctcaatttctttgctgtcatattgacttgcttgcaagatatttccacatggatttcctgtaagaacctcaaaataaacattttttcaagacagagattgttatccccatgctgtctggactagatattctccatctgtccctgaagagtccccccacaccctctggactctctctgcagcccaggagaatgacctttctggatgtacctggtctctcatgtcctctggcttcctgttgggcttggctcatgagaggttctggtgggagatcaaagagtaggaggagaatggaacctttctattaagatgggttgagttgaaatgggctgtgttcctcttcctacaaccatagtcccactcagtggtcctctctcctgcagctctgtctggtttcctcccttggcccctttagactcagggttgtgatggctctagatgttgccagccctgggttcctctcctttccttcttggtgactagccttgcccatgcctccacagagttccttttctaagcatcctcatcacctgatgattgttccttcttttctgcaaggccccagctcagaccttttccatgtggcccctcctgtgcagggctctgtgcatggcaccaacgccagcccaggataccaagccagcacccagaggcatctttgtgtctccatctttcaccccactgccaacagatgccaagtcctgtggcttccttttcctaaaagcctttcctcatggtccctctttgctgtccccaaagcaccagaactctttgggttgtggaaataagtgaaaatcaaccaagtgaggaaaacagaggctatttattcacacgtgctgtagtaagggaccatcacgtgcatttggtaacggcccaaaggcaggcaggggagtgagaaagcttcatgttggaaaagggggaaggcctcaggcatgccctgatggaaactgtcatcatggggaagctgcaggtgagctacctagaaatggacatcctgtgtgattggtgagggggcatatttgacttttaccaattggccttaagttggaagtaggagcaaaaatcagggaaatttggttattaaccaagtcctggtcatttgggccaattgttacagaagttattgtttagctttctggagtgtcactggtttcttgcaaggctgacttacaacaggctggcttcctgggttgtttattgtagaaaagcagttggtttcctgggcaggtggctgcaggctgtgggtccaagtgctatttttatatgtggttggccactgtccatttctgtattcaatctcagggtcagtttttaattaactgttttttttgttgttgttgttctggattataaagatggtatatactcatgtagaacattttaattaacccagaaaaatattaaaaagaaaaacaccttgtatcctgccagcagaggtaaccattgttgacatttccaggaacatcttttcagagatctctctgtgcattgacacattcatacatgagtggccatcctctacaaagcgttctgtagccctctcatcagttttcactggggttgctgtggcagtcaccatatctagatcactgttccagtcttgccaacatccacttcatttctcacagagcttcagattgggctctctctaattcagattccatcagttcctgtcctgctttaaattgttcagtggttgctcatcaagtccaggctcccagcaaggctctctgggccactgatgatgtgtcctcttcttccaaaccttccatctcttctctgcacttgggggaactcaggattctctaaggactgtgctccttcctgcagatgtgtgcccacatgttgcctctgttgtctcccaggctcttcctcagcccccatagactagcgaaatcctcaggagtcagctcagacttgcccttccctggaagcctgccagagagctcccaatatgtttagtttctgtcctcaccacccagtgcctgcctctgggacagcacttagcccacaggatgacagtggctggctttcatgtctcttccctgacagaccctcaatcttcaaggtaagcaactatgctttactcattttgtccccagcccagtgtctgtgatggtacctgagacatagtggaggctcaggagacattgcctgaataaatgaggtgctgggtggatgcaatcatatgtatgtatgtgtgtgcatgtgtatgcgtgtgtatatgtgtgtgtgtgatacatatatatctgtagatgccctgattgtatgtcagcttgctgtttgggtacctgccatggtttgaatgtttgtcttctccacaactcatgtgaaatttaattgccactgtgatggtactaagaggtggaacatttaagaggtgattaggccacgagggctcccccctcacggatggattaatgctgctattgagagagtgggctcctcataagagaatgagtttggcccctctcttactttcttccctctcaccctctcttacccttccaccttctgtcatgaaatgatgcagcaagaaggccctctccagatgctagcccctccatcttagacttgcagcctccagaattgtgagaaataaatttctgttcattataaattacccaatatgcggtattctgttacagaagctaaaaaaacaaagactatgacagtactagacagagatacaaacacctactttccatggggaaaccacttacaccattaaaaaaacccctcagcgattactttttaatatggtcaataatacttctacacactttgcctccattatcatacctcctatttataatcccacgaagatttttgtggggagtgaaatgttatattcatgaaaatgctttgaactttttggagaaaaattcactcttccccaaatcagtaagggagccacactactctatcaataatggatagtatatcgcaaggacaaaaaaccaaacaccgcatgttctcactcataggtgggaattgaacaatgagaacacatggacacaggaagaggaacatcacacaccggggactgttgtggggtggggggaggggggagggatagcattaggagatatacctaatgctaaatgacgagttaatgggtgcagcacaccaacatggcacatgtatacatatgtaacaaacctgcacattgtgcacatgtaccctaaaacttaaagtataataataataaaataaaaaaaatggatagtataggtgtctatttttccagatgagataagctgagaggtgactgggaaggaatgcacatgatttggaatgccctggaaacagaaagaatgagaggtccagacagagaaaagctcaggttaggaacgggtctcctctgggatttccaacccaccaagccatgtcctcttgggaggaggagaaaagggcaacaaaactggcagaatccttattccacagcctgtccccaaacaccatctttcactgatggtaataattcaagtaagagaagtggagattaagtagttgctgaactaaggatcagagagcaataactgaagcttggcaggcctggtaatttatctcctatgcaatgtttttcagatgttcctgagatattcaagtctagagaccaggcttatttggagtatgtgtcatagggaaggcaacagtggggggtgtgtaaggatttcactgagttgcaggaatcacaaattaggatggaggttattttcaaacctctttatatggcatatagtaggcagaataatggccccaacgaggcccacatcctgatcccgggaactgtggatatgcatgttacatgtcaaggagaaattatacttccagatggaatggaggttgtcagtcagctggaagattatcctaggtcctgaaaagtggaagagggagacagcagaagagagggaaccagggagatagtagcataagaaggacttagcccaacgttgctggttttttttttttttttttttttttttttttttttttttgacagacagggtcttgctgtggcccaggctagagtttggtggtgcaattagggctcacggcagccccttgacctcccaggctcaagtgatactcctgcctcagccttctgagtagctgggaccacaggtgtgcaccaccatagtcagctagttttgttatgtattatttatttatttatttctatatttattgcagagatgaggtattactctgttgcccaggctggtctcagactcctcagtgcaagtgaatcctcctcccttggcctccccaaatgctgggattacagaggtgagacatcatgcctggccatggttgctggttttgaagatgtgggaaggggaccatgagccaaggagtgcaggtggcctgtagaatctgggaaaggaaaggaagtggattcccccagagcttccagaaaggaacacagccctgatgacaccttggctttagcccagtgagactcctgttggacttctgacctctaggatcttaagtcaatgcatttgtgatattagtccaatcaattttcagtaatttgttacggcagcaaaggtaaacaaaacaggagtaggcagattcccgttcaattcaatttatacacactgaacacctgctatgtgccagatcctgtgctaagagctgggtacaggggtgaataaagatgcagcccctgccctcaagtctcacagccttgaagaaaacacaggagcacacacgtcccactagggcagcggaggcaattccaggatcacggtgtgttcgctggggcagccgtgacaaagtaccaccaactggtggcttaaataacaaacttttgtttctcacagttctgaaggctgggaaacccaagctcaaggtgccggccggttctgttcctaatgagggctctcttcctggcttgcaggaggccacctattcacgcccacatggcagacagcaaactctatctgtgatctctcttataagggtgctgactccatcctgagggccctacccttaggatccaattacctctcaaagtccccaactcccaaatgccatcacatggtggattaggatgtcaacatatgaatttatggggaacataactcagtccatagcagatgggaatggggagatggtggactaactgtcttgggtgaggtgggagcgggttaaggaaagcaggagtggcagtccttaggtagcaaatcaaaggcccagggataatccagatctggggaacagagtaacaaatcatgaggttgcaagagagcccacttccttcattcttccagctgtctggtgatctggggttgctttgggcctatctctgaggcagaggggaagggaggtgagggtgtttactgagtgtgctctgtatacaattcagtcttctccaaaaggctgtgaacaaatgtcgtttttatcaccattgttaagataggggagaggagtttctggaaagttccataacttgcctagggtgtttgacctctaaagctggtattctccatgatactcacttgactctgagtaattcccctctgattaaacagtggaaaagaaaaagacaacatgacgtctcctgcgaccttaaacccagcactgagacagtgcctggcacataacaagagctaaagaaatttttcttgaataaatgaataggtaatttcagatcctttaagactgaccatttggaatgggagtctataacttctacatactctgtaaattgtcctttatccactctgactgctcagtggattttttcttttgagctctagcattccatccaaataaatcccaagcaaaagttttaagtgctccagctactagaattgatggcaaagccttatattcgctgatatttttgctgacttttggagccttgttcataaggtgcaagatcagtggaacacttgaatgtgtgtgcagagcactgtgtgagccctgctggaagcttccagaagtacaggatgtggtcccaggcccacacatgcatgaagagaggaaggggaatggaggcagaggaaaagacgccctgccagggttcagcagacacaaagacacaagtgtaggaaggatgactgagaaatgatctgttttttcccaccccaaaaggggcagttgttttctttgccccctttggagagggccagaaggggatttgtgtcttgccagaagggatttatgccttgccttagaggaggttctttaaaggtctttggtttcccaaagccttggctgtggtaggcaaagcactggattgctccaaagggatgaagctttgggatttttattaggaaaagctggcaaaggccttactagggaaagggaggggcccctaagacctgcagaagtgagctgggttttctgatatacagaatctgtgaatatgttccactatacaaagaaaaatcgaggttgcagttggagttaaggttgctaatcagctgaccttcaactggggagattatcctggattatccgggaagcccagtgtcatcacaagagtccttttaagtgggagagggaggcaggagagggagaacgagagagatggcaatgtgagaaggactcagcccatggtgctggctttgaggggggaggagggggccatgagacaaggattgtgggcggcctctggaagatggaaaggcaaggaaacagattctcccctggaaggtgcagcagtaatgcagtcctgctgaaaacaattttaacccagtgagacctgagttagacttctaacccgcagacttgccagatacatttgtgttgtttaagcctccaagtttatcgtagtttgttccagctgcataaggaaactaacacagggtaatatgggggtgcctggagactgagtcacagggctgagaccttggagacccagtgatggtctcatggctttcctggatatagaggaaatgtacccacaggcttgtgacttgtaatgtgttgtgcagacttagtcagaagcaagaccagaaacccctccacacgttttatggacagtgtaagtttctagggccatttatacaaccccaggtacgggtggtgtccctcaataatggtggatacgtgaacacttccaaccctggacagcaggtgctcagagccagtttaattggatctaggaaaattaagggttgtgatgtatcttgcacctgagggtggtgagcagattcacagctgctctgctcatcaagatttttctaaaagaatatgttaattgccgcagaactgcacttgtcagagcaagctcataaaagagatgagttttcagttgtgtttggaacagggtaggagtgggtgggtgaggactgggatccatggttcgtggatgggaggagagaagagttcagaaatggatgttaggaatccatctctagaagtcttaacagtgttttccattgactcagagcttggttttgtggtagtgggaatgtggcaatatgaaggattctggtgataggaagtggaagacttcataagcaaaagccccagtcttagtggaacgcttcaaagccacaggttcttccagtaactgcctgggtcttccgcttctccccttggctctaaattcccaacaggctttgtggaggtttgacagctgctccaggagcttgcaatttactttttgttcactttatgcaaattcatacttggctttgtagcacaaaggacaaacctagtggggtctgagttgccctacggaggttttatccccgcaaaactcgggagcccaggaagctgcaatgacaagggaagagtccaggaacaaaaccgtgggagagacctacatatgaggcattccagagtggtctttgcactgtgctgtcttaataggtatagagctatcaacctggagtaggcagtagatatttaacgctcacatttcatctagatgtatatgtgtatgcatgtgtgtatgtatctgtgtacaatgtgcatatttatatataataaacacacctatgcatgcacactttttgatgggagacactaattttaggcagtataggtcaatttctaacttctgagctggggcatggggtcattttcaggtgacaggtggggtaacagccacaggtatgcaaacttccttctagctggtctcgagggcatctttgctcagagggggcagaaggaagtagcactggcatcacttcgaggaagccgggtgtttgcccgtagcacagcctgaagcaactgtgcttgggacataggtgagtagagaataaagtacgcgtgggcaaggccaggcaagcaccagcacagcctgaagacacaccctccgctcgtggacagaatggggcaccatgcagggagccccatagggactgctcaatgaatccacctggactggatttgtcactagatggtgtgagatgcaacttgtattgcacccatacctggagcccggctgtcattctctgccatggagacaaagtgcctatgttgtggctgtcccagaccctttccaagaggatttagactgcagtgtaaagggggcttcatgttgaggcacattatccatttgtggttaaaaattttagcaaggagctaggaaagttatgtttggggtcatgatccaaaggaacttctaccctattagcttaaggattgaatctaaaagatattggaggttgaaaaacggtctcaggaaagtcctctaacttaacacagggacataatctattgaggctgaatggaaagaaggacaaggtgttgcttttggagccaaagtgccagggttcaagacattcgtcaaagggcagtaatcatacctatgcagcctgccttgcaccgtcgccaagaaagctccaagccagtgcaaaccaactatctgcaaaacatctaatgagaggtcagagctgggctaaaaagtcacagacctgaacctttatctgcaggataaaacatttggattaaaggcatttaaaaaaaaatgcttgctgcttttttggtagcagagcataaagccacatcaaaagaagacatttatgcagccaacaaacatatgaaaaaaagctcatcatcactggtcattagagaaatgcaaatcaaaaccacaatgagatatcatcttacaccagttagaatggcaatcattaaaaagtcaggaaacaacggatgctggagaggatgtggagaaacaggaacgcttttacactgttggtggcagtgtaaattagttcagccattgtggaagacagtgtggcgattcctcaaagatctagaactagaaataccatttgacccagcaatcccattactgggtatatacccaaaggattataaatcattctactataaagacacatgcacacacatatttattgcagcactattcacaacagcaaagacttggaaccaacctaaacgcccatcaatgatagaccggataaagaaaatgtggcagatatacaccatggaatactatgcagccataaaaaggataagttcatgtcctttgcagggacatggatgaagttggaaaccaccatcctcagcaaactaacacaggaacagaaaaccaaacaccacatgttctctctcataagtgggagttgaacaatgagaacacatggggacacagggaggggaacatcacactccagggcctgtctagggtggggggctaggggagggagagcattaggagaaatacctaatgtagatgacgggttgatgggtgcagcaaaccaccatggcacatgtatacctatgtaacaaacctgcatgttctgcgcaggtatcccacaacttaaagtataataataaaaaatgcaatattattattagaagctaaaacttggtaagaatgggagcctacctgaaattgctatctggttacacactcaaaaaacctttgttatatgttaaggtaaacaaaatttactacacaaactacaaggcctctgaaatgagagaatctcaaatgtatttgagttccatgatgtctttttgaataaaccactaaacaatgaagtagggaatatttttgagggtgctgaaggaatggactgatttttatttttttgcttaagcagggccaagagaaagcaagagagggccacacacacagagagagaaatgcagtagcctttgcccctaatctcatgagaatctgctaattttccaatctctcactggaatattttatgcctaaaataattcacgatgtggctgtagcatgcactgccctggactgctgagcattttagtagcaaaacatggagagtgttacctgctgacctgctaaggagcatgggctcattcccatccctctgtgtgctaacactgggaccagggagagcaaacgggaggtgggacgcttattgttatcagtattatgtgcctattttcacactcatacgtaagagcaccctgggaatgaagtgcaaggttcaacattcctgtgtttagaggaatgtacttgctgaggcatgagaagtatgagcagactgcgaggctgtaagaaactcagttgtcccgggatgctccaactctgagggtgagttccccctctaaatgtgatgtttatggtatcacaggagggtcctgaccaaaagtgatccgggcactttgtacttagtttctatgtatgattgtgccagctttcacaacattcccacactcttaccagaagggagaatgatgaactcatcacaaaccaatgtagtgtaagctccttcaccctatctcggggtctttgaagatagaagctgtgctttcttgatctgtgtgtcctcaggccctagtacgatgcctgacatatgataattcctcaatgcattcttgataagtgattgtttgaatgaatgaatgaaagagaaggaagacatttccactggattaatgaaacgctaagttggaagagtgcattaggaacagttaaagaatgggcagtgatggaaagctatctacaatgtacagaatcttgttactgtgcagatttgagtcagcctttgatgactactgatagctatgtcacctaaagaagagccttcaggaatcttggatctgtcgttcacccagtgggaggtggagaagcactgtaggtcaaggcgggctgctctgtgtcctcatgagaccttgggcaccagggccagccatgctttggaggggttttccaggatcagttgccttgattcagccccagtggccctgctacactgatcacagctggttggaccagaggtggacacctgaccaaaaaggtagctgcaacaggctgaccagcatcctaggaggtggtctgacatgaagctctgcccagtagatttctatacacatggcggctggatcacccagtcaaaccttctctcccaggaagtctgaatatgagctaaatagagaagccaacagcagcaaaagccgagaggaatacagagggaaggcattaagcagaagcttttaaggagagggaaagagaggagaaacaatgcaggcagaaagaggaatagagagggaggtgctgggtcccacacatggcagacacgctgccacagggtcaccataatgtgaccgtgctcataaatcctggggacaaatgaggcttcagttcccaggaatcctggctaggcggccccagacacattcaaacaaatctcatgacccaaggcagcccctagttcttcctgcaaccctgaggagcctcattcccaaatttcacttcttgggtcccagagccaggctggtgtggatgacacagaaggaagacctgtgactgtaggatgctgtgtgctgtgggaaaccaaggggttctgtaaactgtaggctctgcccctgccctggaagggattcatactggagttagaaaagccagaaaaatccacacacaggtgtccaaggtgttatatattaagtagccaaagtgagagaaaagacaagggctgccaagagtaagaagtgaagagggcaaggtgggctgggcagggaacacagggaaggcctcggagctggggactgagtgctgagggtgggcgagacggccgcatggaaaggtgcttgcagacatgtgcacagggtggcaaatgcctgcagcgtgtgcagctgggctgagaaaggcagctctggtctctgcaaatctgcaggggtttctggatgcctagagtgaccagaagcacggattgaacctgtcaaacaacccgagtgagtggacagggcccagatggtatttcctgacttgggggccagctgtgatcctgaacgtcccctagtgccctgggatcagcacatttgaaggcatgtctgcgtttcttcctgggaaacacagatctctgatgaagataggctatgatgtgagaaacttcaaccaggcgtaaattgcaaagggcagcagagtgttctgttcgcacatcaagaacgtatcccagccttagaaacaaaatagaaacggagagctgaatctagagagccggacagcaggctgcctggcaaccaccaaggaacacgacgctcttagcctggttctgctcctactgtgcaaagggcagtctggagatagcaggtcaacatccacttggaatcgaaaaggttaaaaaagcatgcatttggatggctctctgttctctttttcttttcatatttgttagtgcctgttacctgcagatcgagggaacgctgtcactaatgttatgttttataggcgagcctttgctgagtaagagactacactcaaaagaatcaccaggaccctcccgattttcaaggcagggggcaggtcccagtccctacactccttggtctctgagacatcggacactatgcctttcattcccatgggatgctctcattttccttggctaggtctattacattgagaacaaggctgggcccttgagcatgtgctgcctgactctttagagcacggggtgccttccttgtggggtctgaaatcaaagacaacatgcctgcagatagttttcttgaatttttgaagacatctggggcctgggccacacataagatactgcaaccagctaataattaaacctggatgccacctgccagctcattctccaggtttggcaaatgaaacacacattactagaggaaggacatctttaggggaaggaaggcccatctttaggggaagctgcatccctggtatctttagaacaatgaggcttccccagaaaggagggcttctgagacctcaaggagacaaagtactgtgaatctcaagtgccgcttgcttgagcaaaatgcaaccgactttctaagaaaccatgagatttctgaataaggagaaagggcttttatcagggtttttctagctccatagtttgttagcagaacacagagttggatatgatagcttgaagcctgtggtatgaactgatgtgtctttctagggtttgacacttagtagacaccccacaaatgtcacttggttacagaaataagtgaaggtttaaaatgaaagaagaaacgtactgtgtctttatttcctgtggctctagctgatccgggacaatggactgaatgccatcatgagcctcaatggacttacctgtaagaagggtcacgtgagattccaacgctaatgagcgtgaaaggtttttgcaaacaggaactgcagcacaaaggagaggtaatatgttgctgttgggtgaggtgtcctggctgggtttgctttagtcctcactttcggtacatttcctgcctaagatatttgtgatggtggaagaaaggcctggatttcttcctttaagattaggagtggctagtttcccttttgggggctgttcctaggacttgaggcaccgtctcagagctgaggagtaagcaaggctaagccgcagtgcagctggacagaaagccggagaggtattgctgggcttctggaagtccctgaagggtggagcttctcaataggtagcaaaatgacaaactctagacaactccaggatgtgttcaatgataaaacacaggctctggaagctggcctgagaaagaagtcttaattccttaaggacccgagcgagacccagttctaaatcttagaaaagaagtttgcaagtgtcttagtggatgcagagtcaagataaacagaattttctagcaccgtggaaggaacagaaattacaataaagaagaaatagaatcaaaaggaacttggctgacttttatagcttctggttgtctatttctgggacatctatgttcagtggcaaaatgaaaaaagaaaaaaaaagaaaaaaacaactacacaaacacacatgcaaaagctttcaaagaaggcaagaaaaagctatgcccctgggatagaaggctctttcctgagactttctttgttatcctaagtcctgcaaatcttcaaatgttacctgagagtgtttcatctggaattcaaagtcaaaaccaaaacaaaactaaaacccaaaaagaaaggcaggagagaacagctagtcttgaaaataggcagactagttgagggaaacaaatctgtgtgtgctttgccatgaggggcaactgaaggaagagaggagcctggattatccatgatttaagtatttgtaattgagggaacagaaaaggtgtcctctctctgtgtttagccagcaagggagcatggctgagttgccttgagctcctgaccctatcatgagaagccatgaaggggtgaggtgggtgctaccatgggccagcctccgggtgagaaggatggatacgagggtgcggtacaggcagcaggagctgtgccaagcagagtggaggctgcccctttccccaagcacatctcacactgcaccttggcctttggtggagccactgacttctggagagccccatgctgtgtgagtgctaaatgcggaatgcaggcactttgtgaagtctttattcggtggctcgaaatgctcagagcttgagaagaaaaatcaacaccaaatgggttagcttcctctagatgcttttggatgaaagctcttccaggttctgtggatggatggacgctgacacagcaccctcgtttgtaaagcagggctggtggcatccacttggaggctggcacaagggttgtgtgggatttccctgcccgccaagctcctagcccttgattcagtgtctgtggctcctttaggacctgtgctggaccttcattaaaaaccaacaaaagtaggaaaactgatgcaaataaaagaaataataccacagatgaccattcattccatgtcagaaacaaatgcctggatattcctttatgataaacctggagagcaggaaccacccattgaagacagtgtgggccacagaccccacggtcagagaatgggtggtgggagcagggctggcgtgggggcctgggagaaggcaggggacgtgcgtggaaacagaggcgcagtctgggtgaggggtccaacccttaggcagcactgacatctccccgctatgctggtctccaccctggccccagcattcacactgcattcctgctttgcaactgtgaaccctgtgaagcaccgagtggagtgtccagcctggagtgagcactccctcacagtgtgatgattccagcccagagtgagcactccctcacagcgtgatgattccagcctggagtgagcactccctcacagcgtgatgattccagcctggagtgagcactccctcacagattcaagcccggagtgagcactccctcacagcatgatggttccagcccaagtgagcactccctcacagattccagcccggagtgagcactccctcacagtgtgatgattccagcccagagtgagcactctctcacagtgtgatgattccagcccggagtgagcactccctcacagcgtgatgattccagcctggagtgagcactccctcacagattccagcccagagtgagcactccctcacagcatgatggttccagcccaagtgagcactccctcaaagattcgagcctggagtgagcactccctcatagtgtgatgagtccagcccagagtgagcactctctcacagtgtgatgattccagcccggagtgagcactccctcacagcgtgatgattccagcctggagtgagcactccctcacagaatccagcttggagtgagcactccctcacagtgtgatggtaccagccttggtgagctgtctctcacagtgtgatgattccagcctggagtgagcactccctcacagtgtgatgattccagcctggagtgagcactccctcacagctatgatgtttccagcctaagtgagcactccttcactgattccagcccggagtgagcactccctcacagtgtgatgattccagcctggagtgtgctctccctcacagtgtgatgattccagcccagagtgagcactctctcacagtgtgatgattccagcccggagtgagctctccctcacagcgtgatgattccagcctggagtgagcactccctcacagtgtgatgattccagcctggagtgagcactccctcacagcatgatggttccagcccaagtgagcactccctcacagattccagcccggagtgagcactccctcacagtgtgatgattccagcccggagtgagctctccctcacagattccagcctggagagagtactccctcacagcatgatggttccagcccggagtgagcactccctcacagtgtgctgatctcatttgttgccaaagcaatcattccctattacggagaagagaacaccattttgacttgcatgaggccacacgcctagtcactggctggctcgagcccaggttctgacttgaaatccaattcccacaaaatgctttccttagcaaatgattcctaattaatacaacaacagaaaggcctcacaatgtcaaatcttagaatgagatcaggtttccagcaggtgtccctgcattcacccacctcctgcgaatggcttcctggcattaggtttcagggtgtcactgggtgggttgagggtgtggggatggtgagggaggagaccctgggcctggtttagtggagggggagaggcttcacctaattttcaggggtccagctccagttgactttcctctttgtgctcctaggcatgaatccttgagcgattaagacagtgggagtgacggggcagagtcaccacggaggtgggtgtctgcagatgtctgtgaggctgatggtgtgtgggttctctagggtcctgtaactttattatctttagactcaaaaggtgttctgggatcatcgtatttgcattggtgggagtgtgtgtagaataatagcagttattttgggagaagttaccctgcgccaggtgctgtaaatatcacctcctccttccattcttaagatgggagtatccacagtggtaagctggtaaaccaagtgtccagaaaaattaatccctcatttgtagtgtttgctgattgccatgatgtgaattgcttttaccactgcggatttcaagattatcgaccattcacaggattcctgaatatctacccgtcaactcttatgagccagaggaactggctctagtacaaataagccaagtaagggattgtacagacataggagtaagcaatagagattttttttttgagacagggtctggctatgttgcccaggctgcagtgcagtggtgccgtgatagctcactgcaaccttgaccctcttgggattaagtgatcctcctgcctcagcctcccaggaccacaggtacatgccaccatgcctgcctacttttttgtttttttgtagagatgagagcttgctgtgtttcccaggctggtcttgaactcctgagctccagtgatcctcctgccttggcctcccaaagtgctgggattacaggtgtgcgccaccgtgccttcccggccttagatattttacaggcgaggaaactgaggattagagatcacatggctcagccctgctcacatgggttgcaagagttgccctcagtctgacccccaaggccattgcttttaagtcctcctcttgacagcctcctggcccctatctgaggctcagctgagtggtgactgttccatgtttgaggctggggaggagatcagctcgcagttcagcttcctgtcccccaggtggcaggggcggtcctggctgggaaggctaatttgtccgggctgcatctctgtcctactctcgccagctctgccacagggcctctgtctttcccttgcgctttgaggtttctctgggtgcctcaccctcctcttcttgttcccagacacaccactgtgaaatgaatggcgggactgcactgaacggcagaatgtttgagggcttggtcatacagctggagggaagagtgagaccaggaagagctgaaacgcggcctctccatccctgttacagcagcacctttctcactgggctgcaggcaccctgaccgcaaaggtgttctcacaaccccgcagggtcttgctcctccctgtgccgccaagcttgccactccatctgcctggcacgctcatccccgccatccccatcactggcttcccattgtcccctgggtcttgtccttgaggaagcctcacaagtcatcctgtctaagtagcactgttggtcttctccatagaaccttctcttcctttcctggcatctatatcatcctggaaccattttatctgcgtgttcacctgtccaaccacactgcgatggttttaaaatatgttcttaattcttagacactccttccttccaaaggcagagtgtcattcctctccttttgagtgtgggctggacttagtgatcccgttctgcagatgagaacatggcagaagaggtgctgttaggacttctgggctgggtcacgaaaggacagctgctggctggcctgctgtcttttggactgctctccccaggggcagccagatgctacatcgtgatgacactcaagcagtcctacccagaggcccatgtcagaaggaacgaatgcctctcacccacaggcagcaccaactcgccagccacggctacgagctgctttagaagttgactcagcccagtcgagccttcagataactgcagacccagccaacatcagatggaacctacaagagaataagtcctggtcccgacctgcccagccaagctggtcctgaattcctgacccacagaagctgcaagaataatgtctcctgctactttaagccactatgttttggcatattaggtagcaatggaggattaatataaatgttgaaatgctatgattcctcatttcatggacaaggaaactgagccacagagaatttacacggctcacctaaggccacacagagtcagaatttggacagaggcagtctgattccagagtccacacccctgagccctgtactacaacctccctccaaacaaggcaccatctcaaacagtgtcatttttcctgtgaagccccgattaggtggtgggcaggcacaggatctttccctccccagacagatgtaagtccaacagcgtgaggcttctgacagcttggtgctccacacagggcaggggtgcagagtcctgcctgaccaccagccatccagctgtcacgagccagtacccttgctcctgggtctgactggaacttcaggcgagtgtctcatgcttaagaacctgcctttttccttttatccctatgttttgggatgcaagaaaatgcctctcagatgtggtgtggtctcctggcacctcacctaggatgggaggcctgggatagagaaaggctcaggttcctcctgtctcacctgggctgggaatgaaggactgttctcccttctcttcaacatacattctggaggcggggtggggaactgtcttaggcctgggtcaagaggggagggccagacggtcttgggctgagtgtgctgagctcagagaggcacatgtggatgagacaaagccaggcaggtcagggaagagccagaagaaagatgcactttgtgggtcctaggcatctgggttccaggctagggaaactgggcagggaagccttgccaggggacgccccttagagtaagggccaatggtggtgttgcgtgtgtgtgtgctatgtgctgtatgtggtgtacgtgtggtatgtgtggtgtgtgtgctgtatgtgtgttgtgtgtgcatgtgtgtgcgatgtgtgtgtatgtattgtgtgtgtgtgtgcatgtctgtgtgtgtggtgtgtgccatatgtggtatatgtgtgttgtgtgtggtagtgtaatgtgtgtagagtggtgtctgtgtatgtgctgtgtgtcttgtgtgtattagtgtgtgtatatttgtgtgttgtatgtagtgtgtgtgtatatttgtgtgtgttgtatgtagtgtgtgtgtatatttgtgtatgtggtgtgtgtgttgtgttgtgtgtgtatatttgtgtgtgttgtgtgtatgtagtttgtgtgtatatttgcgtgtgtgttgtgtgtatgtagtgcatgtgtatatttgtgtgtgtggtgtgtgtcgtgtgtgtggtatgtgtgtatgtgttgtgtgtatgtagtgtgtgtgtatatttgtgtgtgttgtgtgtatgtagtatttgtgtatgtgttgtgtgttgtgttgtgtgtgtatatttgtgtgttgtatgtagtttgtgtgtatatttgcgtgtgtgttgtatgtagtgcatgtgtatatttgtgtgtgtggtgtgtgtcgtgtgtgtggtatgtgtgtatgtgttgtgtgtatgtagtgtgtgtgtggtatgtgtgcatatgttgtgtatagtgttgtgtgtcgtgtggtgtctctgtgcgtgtctgtgtgcggtgcatgttcatgcactcacttttgcacctgcaacccatgctcactgtgctacactttccacaccttttgccccagaccctgataaggtccagggaggagggtggtgaggaatgcctgcaacgatttaattaggaataaagaggagttgctgatctggtttagggcgggccaggagtcttttagctccagaaggacaggggtgtctgtcagctgtttgctgctcataaattccccagtgtgtgtgcaggattgcacctatcctctgagctacctgatgctggggtcttgaccagataagaacaccaaatatcctcttcctttctcattagtagacaggccaggcccatctgaacccactcctctggctccctgaggagtgtttgggtgtccccgcacttagcatccagcacagatggctccttccaaagccacactccagtggcttctttggggtggatgtagacgctcagcccatggagagcagctcatctaagttacagccctttagagtaagggatgtggatgaacaggtgagaggcttcctgctcgtcattagaaatttttaaaaaccacgtggtccacaggtcttgaggccaaggctgatgggctggctgggcaggagccacaggaagaaatccacaggtgctggccatgtggaactgcctgccaagtttgctggaagcagagcccgtttcttttttcggcagcctgaataagaggcaatggggaccctgttgaggtcaactcttgtatgttaccaacgcccacagctgtgtgcctcctctgaggacattcgagtgggctcaccacgatgacatgggccttctgctggggaggctgggccattcggtgacctgtggcgctgcgctgtgtgatgattgctgatcagctgtggctcccaggccagcttacacatgacgatcccctggggaggttttaaagattccagtgcctgagccccactccaagccaatgaaatcccagcctctggaagtagggcctggcatgggcctgtctgcaacacgccccagctgttcctaatgggcagcccgggggtaagaatcagcgactgagaataacgatgttccaatcttgattcagccggggaaatctttcttcacacagatgctactggagtgaacacaagcagatgaaaacagggctgtctaaatgacacgcagccaccagtgactgcccgggctcccgagaaatccagattcatcaggacccactgatttgggcatctgatgatggcatgtgaggaggaattttccaaagtttctgggagagtacaaggcaagtcaccacccgctcccagctgtgtgcctttcctggggccagaccctgcagcagctcccaccttgtcccacgctggatggcagcctgcttgtagggggggcctgcagacaccttctcaccccacccaggacttgaaggcaagggtggaatttttggtggatgcgatgatctgtcttctcgtggtaaggaggtgattccctgaacagctgggacaacaccatcacctcgtcttcctttctcctctcttacttcctgctcctgatcctagaggagccacagagctcggcccttccccacccccgccttgatgtggcttgggcaagctaagggcaggtggctctgtgtgtcatgaagtcctgtagggcctgctcctgagactttcctgcccactgagtgggattactgagtgacagctggccctctcagtgactgtgtgcctcaccctgtgcttctggtatctggacaatgcccttcccaaacaggaagtgtttgagccatgtgttctagatacatggctgtttttctcttgtttaaaaacctttgtgtgtgatgttccccaccctgtgtgcaagtgttctcattgttcaattcccacctatgagtgagaacatgctgtgtttggttttctgtccttgcgatagtttgctcagaatgtggggggagggggaagggatagcattaggagataaacctaatgtaaatgacaagttaatgggtgcagcacaccaacatggaacatgtatgttcatatgtaacaaacctgcatgttgtgcacatgtaccctagaacttaaagtataataaaataaaacaaaaacctttgttttacccctgactcatctcacatatctacatactcaaaggccatgtttgtctaggagtagaaccaagtccctgatttgacaaagtgaattattataacacatttgtgtttaacatgcaggtgagtcatagatgaaataccacctatggaaactgacagtcgctgctatgcctttcttggactatggtgagtgagattgagggtctggtaatgcaagaggtacctagtcatggaaatgaatggagaagcagctggtttgaagggactttctccttccaaagtaataagctgagaaaacggaaaggtgtgagccatcagcagagtatttaggaagcatgacagatggaggggacaaagtaagagagagacttcagcttgggatgattggaagaaaaatttgaagatatttactttttttttttttttaagacagttttgctctgctgcccaggctggagtgcagtggcacaatcttagctcactgcaacctctgcctcttgggttcaagcgattctcctgtctcagcctcctgaggagctgagattacaggcgtgcgccaccatgcctagctaatttttgtatttttagtagagccagggttttgccatgttggccaggctggtcttgaactcctgacctcaggtgatccacccacctcagcctcccaagtgccgggattacaggtgtaagccaccgagcttggccagaaatttactttttgatggtgctttccaaaatgagtttccaggcagtctgcagtcagttgtatttttaaggttgaatgggtgtttggtcatcccgtgatcttacagtgctttgaaagtgctttcagaaactgctgcaactgaggggagaattgagggtggttgatgggggagatgcaagtcaggcaaaccagccagaagccttgctctaagatgcaggccaagaggcaccgcaaatatttcacttccaagccaaaccttccttctcagggggtgaagcagtgttgtgctggaatcagctgtactggcctatgagagccaattgttaaattttcaggaattttataagctggttgttaaataaggctattttcaaaattaaattatataaacttaatacttaattatattaaaagcaaaggaaattaatactcaaagcttataatctttctacttattttgtcatattttactgtgtcaatgttcttggggttgtttccgtctgttgtgtctgcatggtggaaacacttcatatgacatgccactgcacatctcttttaaattttgtgttcatgacatcgctttgatagctggaaattggccatggtgggatatggataccagggagactgtaaaacaaaaccagtttggcttgttttattgttctgtcgatgatcaagatcagtggttctgaactgggaggatttttcctccagggacatttggcagtatctggaggcgcctttgacagtcacagatggagagggtaggggtgctcctggcatctagagggtggaggccagggaggctgttaaacatcctacaatgcatatggcagccccctttgcctcccagccccagacacggaattctctggtccaaaatgtcaatattgctgaagttgagaaatcctggtcgagatttaaggaagtgatgggaaattaacttaaaataacttaagactgtgtcaagttcatacctgttacattgtgcatactacaaaaaaacccctgaagccttctttcagtgtttgaaagctattatatgattcattaaagaagttgttcaagtcaatgaatgagtcaagttctaacacacttcttcatcttctttgtttcactaaatgaagatgtcaatcactacttgcatggcaactatcctcatttaattgtagaatcaacaaaagcattctgtaagaatcaattggctatgtaaaatttataataaaattattatgcatattttgcattgcatatatacaaatatgcatattatgtattttgcatatttgtaagttgagtgctgtacatccttcttatcagtaaaatgtgtgtgtgcataatttttcctgaagagcctgttgataaacatttaccagcacgccactagttagaagctacagagttatcagattttaaatgtaacaccctcattctgcatcccacacaacatgttcatgaattttgtatctggagaaagctcagtactgtatggttcgggaaactgttttttgggaagaactggggtaactaagaatggcggctctgtatgtgggtggagtaggatgcctgtcctgtcatgtgatttgggcatgccgaaaggctgccactccctaaatatccactccagagtcctgtctccagggtttgacatgaacccctttggagacaggtgggttgtcactaggctaaaaaggaatgggtgcagggacagaagggatgggggtgggtaacacggtaactgcctagagttttggcaggattttgatcatgcatttaatctgttagatcccattgtagcccatctacagctgaagtcagaaaaaaataaccaacgggcctggtaaatttggatagcaggaatgaaatggaaatcccccgagggttctaagtcagtatgggacactctgatgggaccccgggcagtggaagcacatggtggtgattggctaagggttccaaaggaagggaatggatggactttactggctttgcagttgcaccaaaggaaacgatcactgaatctagaccaggggtccccaaaccgtgggccatgaaccagtgctggtctgtggcctgttaggaactgggccacacagcaggaggtgagtggtggatgaacgagcattactccctgagctccacctcctgtcagatcagtggaggcattagattcttacagaagcacgaaccctactgtgaactgcacctgcgagagatctaggttttgagctccttatgaaaatcaaatgcctgatgatctgagaaacagtttcattcccaaaccaccctcttctacccccacatcccctgatctgtggaaaaattgtcttccacaaaactggtcccttgtgccaaaacgcttggggactgctgatctagactaatgagatgcaactcttaagaagcccacttggatattccaagggtctccccatcctcaacacaccgcattagtgttgggcacactgtacatgggattggaattgttctgtgtcccattatctgacagcttcaaggattggcgagcacacatctttgtctaggtgagaaagatgggagacagagggcgtccagctgcctcgtcctcacctcagggaaatcttaagcatgtcgtcatttgtgttcacagtttggcgttcgaatctatgattaagaacttaggatgggtagaagggtcaaaaggacagtagaattgtggtacgtaggatctgcaagggaccttagaacactctagttcaaatctcatccttcacagagcaggaagcaaccggagcagttaagtgacctcttccagggaaccagggaagaggctgggccacacttgggagttgccactgccaaccctgaactctcaccactccccagccccagtgagagtgacagggagaggcaggaaagtgagaaacccagcagtccaaaatgtcaatactgcggaagctgagaaattctgatctagatctaagaaagtgatggggaattaatttaaaatgatttaagactgtgtcatgtccatactggttatattgtgaatactacaaaatactgaagaaatattctttcagtatttgaaactactatgggcaaaaggtttgtttttttctctccctccaatagtcctaaaattgtattttgagaaatcgtgagaggggaatttaaatttaattttcatgtttccactaaaaaagtgtattgattagattttagctttaactgttgtttgtattttatacacctaagcttggaaaatgatctgtacttagaggaagacacagagtctagaggtctgggaaatcatatgtgagaacaaaaactctttttagacatgtgggctttcatgcaaattatatttccaaaggacttgggtaaaatttttaaattaaaatactgtaggtggctgtgtatggacttttttttttttttttcgagcatctgtgtgagtcatcttgagctgtctgactttttcttctcagccatatgtcagcctgtttgtccttcccaagctgccgggttaacagagttgattccctgaggccactccatacgggtcactgtgacatgtcagtcaggccatctcctgtgtgatatggtggtcagagacctctggggcattcgtgggacccttggagggaaggtgctgttctatttcagcttctgaattttcacattaatgataacataagagaatgacatccaagctccttccggagttgctgcactcacatctctaaaatttctggcagttcctccttaccaaattatccaactaaaggaaaaagtagggaagaagaaaaaggaaaaaaactgagcaaccaaaatacaactgttgaatttacaagatggaggatgacactggatgttcatagtgcatagattcatgaaccctctcagttttccctgctgctttgtaaaaggtgggaacagatctttaccatgtacaagaggtactgtgttatgagttatcacacctgatttacttaaaacatatacactcttagatgtagctatcattatctccaataagcacaagaggcaacaggcttataaggaaactgtccccatgctcctaatatgaagttggcctggaatttacatacagcatttttctctatgcttttctgttcaactgtctcttggtgcaagatgaaataacacaagtaaatggcaaaacgtaattgaatgggaaggggcacttattttttgagttagtgtagaaatgtgtgttggggagcccacctacctgaagggaatttatagctcagatggaagtttacctgcatgcaggtgtgtttaggagaaagtaccaactttgatgaatcagcctgaggaagtccaacctaggatgtgattgtaaacattgcacgcatggtaactgattgaaccagttgaattttggatagagacattgttcagctcttcagatgctgcgcacggggtgatgtggagtatagttaggacactaggctgtggttaagctgcattgatatactgtgtcagtgtgggcaggcaatttcccctaagagcttacgtgatgttccagatgaaaactgaactctcttctccgcctgaaaatgtaaggtcacatggaaaaggtggctaatgtgtgtatgccagcctctgaacatggtgtatattgtgttcagataccccccaccccttttagttttatacaacttcagactttcttagttgtgaaagacttaagtaagacctgatctggtcctgtagccttcaattttattattattattattattattattattattactatatttttttagtagcagaacactttattttcaaactcaacataggcaatatataaaagctaagccactctggatgcaacggctgctaggacccacaccctaatatcttatctcctttccccactgagacgcctccgagaaatcctagagttctagagaacagagctggaaaaatgctgcaagttacggaattgattgggaagtaatgggatcctgacatttggaatgggggctgctatggtttgaatatgtcctctcaaaaacttaggtgttgaaacttaatggccaatgggatggtattcaaaggtggggcctttaagaggtgattaggtcctgagggttcctcccctcatgaattaagggattaaggtgcttgctaaagaggcttcatgcagcgttaagcccttttgttcttgcccttactcctgccatgtgaggacagtgttcctcccctccagagaaagcatcttggaagtggagagccatcctcatcagataattgaacctactggtgccttgatcttacacttctcagtctccagaactgtgagaacatacatttctattctttataaattgcccagtttcaggcattccattatagcagcacaggtggataaaaacagagacatttcggcagatccttatgaaactagggttaccagcccctgtattctacccagttgtcttggccagtaggagctgcactttcaccctatctgaggaagttttctctgttttggctcaggaatctgtaagggcctctcttgggacagctgtcttgtaagacactgctgattctcctcaagactttcgcgggccatttctatactcaagtcacagcgggctccaaagggtgaggggcagagtgtgacctgtgaggaggtgctctacactctaaaagaactgcatgatttttttttttcaatttatagagaaggaattgattctcatgcctgtgaatcaacaggcaaagaaggggattaatataccacttgaggtgattgatccttatcaacaacaggaaattggattgctactacataattgatgtaatgaagagtgtgtctggaatacaggagatcctttagggcatctcttagtactatcaagccagtgctgaatgtcacaatggaaaattataaagctgtcctctgcaggactgataatggccccggcctttcaagaatgaggtttgggtccctccactaaacaaagaaccatgactagctgaggagtttgctcacggcaaaggtaatagaaaatgagtcatggaagaaggtagttacatcagctatgatcataaaccagttgcagaaatgaagattgtaatagttatattttttcctattttgaggggatatatttgtatatatatgttttcccccttcttttatctcctatctaattatcatctattaatgcatctgttatcacctattagtatatctattaataagatatattaataatggttaactttatatctcagcatttaaagtgtagaatgtcaaaggataagcagaacatcaactaaggactttgcgtcgttttctaggaaaagagttggtgtgcttttgcctgtacacaggatatttggtcacataaggaggaattatgacatggctattgtctttatttggcgagtaagtgtgttttaaggagatagtgtggttgctcagttgataggcgtggtctttgttggtcttttaggtatcaacatggcttagcagtagtccccagttattcactcacccaaatacaaatatagatgctgctgtgaaggtattttgcagatatgattaaagcccataatcagttgactttgagtgtgagagattatcctagataatctagatggacctgaatccttaaaagcagggttgagtcttctctgagataagaagagattctgcctgtggaccgaagcttcagcttgtgcccaagagttttggtctgttcttccagatggcttatcctacgcatttcagacttgactagccagctgccacaattacacaaacctattctctgcaataaatctcttactatatttctcctactggtcctacttctctggtaaacgttgactgatacacttgagctgactttctagtgggtgtgtgggtgaggtatctgctcattagtctatggtccaccagagcccctgtaggtggtcccagaagtgaggctacaagcactgctagatccaaggagatgcgccagatagctccttctgatttatagaaaatgatgttttaatgaccacctaatttctagtgaatgatttttggttgaggctgatgtagttttatatgtattacttggaacttcccaaagtatgcttttttcggggggaaaataagggcaggaatttctctgggcaaataagtctgagatgtggtgttgaagataattctttattttaggatttttcatggcctctacaatgctactgggcatgagaggtccaaaaaacgaacagaatatgcagtttatacccatcttgtctgaatatggaacgatgttttccccttctggggactgcaacatgaaaattgcatgaaatacatttttggaacacttatccacacatctatggcccataaataaaattatctcatctgcatcttattagcttgccttttacttcacccatagtgactcataattagacaatggtcctacttattaaaatgtttcatagtaaaaacaaagaaccaaaaattaaagagtgccccaaaattatatttgaaaaaaggatattcatgtcctaatctcaaaaggttacccaatggaaacagagcacgccgagacaatttattattggttgcacatattattatgtttataccagttggtgaagtgaaaatcttctagtttgcttatttagggttcattgatagaaacacacacacacacacacatgcatgcatatttaacagtagaaatttaaccatttgcagattacagcagatggaaattacctgtttttcattcaggcacttaatagttattttagaatcgtcatacttttaaattctactctataatttttccaacagtgaaaaaagaaactaaagcaatgctgtaacattaaatattttaaatgggtttaattttaaaagacaaaattataaagctcaagagacttgggtagaatgtcttatgattatgttggcaccttagtattttctgatatttatctgtatagcctatatttctcttgctatttactctctttcaaccaaaaatttgaggtagttcatttggctttcttaccgtgtttacttttatattacttctaaacatttttattcttcactaaatatgataaagtacatgtaaaacctaaatatgtaatttacaagtttcagtagtatgaagagacttgccatgatttctttatgctgtattaaatgtactatatatatgttatactatagcattaactcaacaaggatactgtgaaatgactgaatcctttcaggaagcctgatgagttcatttgaaaggtctttttcatatggaatacatcagggaattaattagtggggagatctatctttttctacttctctaacacgatagccattctcgggcagttccagggccttcagggtgtctgtatcactggggtgttgttatactgtggcctgtatacagtaggtgctaaataactgtttgtggatgatgatccttttccactgttttcttgaactcatgttgcctacctagataggttgcccacatgggatggctgtgaaaggctgggaggtagctctgaggcttcacggcatagcaggaggctctctggacatttctgtagcatgctgggttccagcctcagccccgtcaactggctacatgtcttgggcaagtcactccacttccttgtcttcattttcaagggcaggaaccatgtcctatttatctttatctcaccagtaccaagatagttcctggtaagggaaacagctgctattctctccttcttatgagtagggagcagagggaaggtgtgaagtcgctaactacggatctcccttcatccctccccttcacctccccctttcctccccagacaacacataattgcgcatccatgttaaagtgggtcttttggagagggggatggaattgtcgacttctgtttgtaattgctttcttaacatggaaactgaaatttgacatgttgcacgttaaattcatcatctctatttttctctaactgccccaatgtgggcaccaaatggaccctctgcaccacacctgcaccagggctgacagtactaagaaatatcattctcttatagtcctaggattactgttattccatccctcctgagttctccaatcttgtcatgaatttttgaagatccgttttctagctccagtttgaagcatccatcccctccaggtgcacggccagtcccctgggccatgtcctgctccattcatacctgggctctgtacttctcatgaccccgtatttcctctgggtcaccctcatgtgatgatttccaaaacactgtttttatcacatcattccctcaagaacttaaaactgctctctacatcacactgaatcttacctccctggcctgaccctgaagatggattctgtgtccttatcctaccttttccttcattcttcttgtcttatccttactgatagcataacaggtaagagtgagggttctggagtcaggttctgccccttgctaactgctcgacctcaggtaagtttcttaatctctctgggcctcagtttcctcagctgtaaaataacaataaagcatttacttgacacaattgtttgagtgctgaataattgtttggggtaagaattttagaagataatagcagcttgtccctatgcagggtttaccttagggctattcttttttttttattatactttaagttttagggtacatgtgcacaatgtgcgggtttgttacatatgtatacgtgtgccatgttggtgcgctgcacccattaactcgacatttaacattaggtatatctcctaatgctatccctccccccctccccctaccccacaacaggctctggtgtgtgatgttccccttcctgtgtccatgtgttctcattgttcaattcccacctatgagtgagaacatgcaatgtttgctttttgtccttgccatagtttgctgagaatgatggtttccagcttcatccatgtccctacaaaggacatgaactcatcatgtgttatggctgcatagtattccatggtgtatatgtgccacattttcttaatccagtctatcattgatggacatttgggttggttccaagtctttgctattgtgaatagcgccgcagtaaacatacatgtgcatgtgtctttatagcagcatgatttataatcctttgggtatatacccagtaatgggacggctgggtcaaatggtatttctagttatagatccctgaggaattgccacgctgacttccacaatggttgaactagtttacagtcccaccaacagtgtaaaagtgttcctatttctccatatcctctccagcacctgttgtttcctgactttttaatgatcaccattctaactggtgtgagatggtatctcattatggttttgatttgcatttctctggtggccagggaagatgagcattttttcatgtgtcttttggctgcataaatgtcttcttttgagaagtatctgttcatatcctttgcccacttgttgatggggttgtttgtttttttcttgtaaatttgtttgagttctttgtagattctggatattagccctttgtcaggtgagtagattgcaaaaattttctcccattctgtaggttgcctattcactctgatggtagtttcttttgctgtgcagaagctctttagtttaattagaacccatttgtcaattctggcttttgttgccattgcttttggtgttttagacatgaagtccttgcccatgcctatgtcctgaatggtattgcctaggttttcttctagagtttttatggttttaggtctaacatttaagtctttaatccatcttgaattaatttttgtgtaaggtgtaacgaagggatctagtttcagctttctacatatggctagccagttttcccagcaccatttattaaatagggaatcctttccccatttcctgtttttatcaggtttgtcaaagatcagatagttgtagatatgtggcattatttctgagggctctgttctgttccgttggtctatatttctgttttggtaccagtaccatgctgttttggttactgtagccttgtagtatagtttgaagtcaggtagcgtgatgcctccaactttgttcttttggcttaggattgccttggcgatgcgggctcttttttggttccatatgaactttaaagtagttttttccaattctgtgaagaaagtcattggtagcttgatggggatggcattgaatctataaattaccttgggcagtatggccattttcacgatattgatttttcctacccatgagcatggaatgttcttccatttgtttgtatcgtcttttatttcattgagcagtggtttgtagttctccttgaagaggtccttcacatcccttgtaagctggattcctaggtattttattctctttgaagcaattgtgaatgggagttcactcattatttggctctctgtctgttattggtgtataagaatgcttgtgatttttgcacgttgattttgtatcctgagactttgctgaagttgcttatcagcttaagaagattttgggctgagacgatggggttttctagatatacaatcatgtcatctgcaaacagggacaatttgacttcctcttttcctaattgaataccctttattaccttctcctgcctgatttccctggccagaacttccaacactatgttgaataggagtggggaaagagggcatccctgtcttgtgccagttttcaaagggaatgcttccagtttttgcccattaagtatgatattggctgtgggtttgttcatagatagctcttattattttgagatacgtcccatcaatacctaatttattgagagtttttagcatgaagggctgttgaattttgtcaaaggccttttctgcatctattgagataatcacgtggtttttgtcattggttctgtttatatgctggattacgttcattgattgcatatgttgaatcagcctagcatcccagggatgaagcccacttaattatggtggataagctttttgatgtgctgctggatttggtttgccagtattttattgaggatttttgtatcgatgttcatcagggatattggtctaaaattctctttttttgttgtgtctctgccaggctttggtatcaggatgacgctggcctcataaaatgagttagggaggattccctctttttctattgattggaatagtttcagaaggaatggtaccagctcctcctcgtacctctggtagaatttggctgtgaatccgtctggtcctggactttttttggttggtaagctattaattattgcctcaatttcagagcctgttattggtctattcagagattcaacttcttcctggtttagtcttgggagggcgtatgtgtcgaggaatttatccatttcttctagattttctagtttatttgcgtagaggtgtttatagtattctctgatggtagtttgtatttctgtgggattggtggtgatatcccctttatcattttttattgcagctatttgattcttctcccttttcttctttattagtcttgctagcggtctatcaattttgttagcatgcctcccgcaccctttatcaaacaggggcatttctgtctcccctgcccctatctgctcttttctttctttcttgtcctttccccagtggccagcctcactttccctggactctctgattggccttactcagcaatgatttatcttctgctttttgactctgaggactttttcctggtctgtttcactttaccctgaattcctatgtttactatttgctttttgtcttctcccagacattgtgccatgttttctagcacttagaatagagctaagctcttggctagtatttttttaattaagaaccaggtactaagtattatgctcagttgactcaaggtagagaactgacatcttttttgacaagttgaattgcattttcaaagaataaagtggagttattggccaacatatcaggcgtcacttctggaagtcatataacacaagtcttgcctattcatttgaaggaaattaagcatctgatgcaggcttttcaacctggctctgtcaccagtgttcccagtacctgttaatagaaaaaggtgctttgtgcgtgcttgggaaagaatcttaacctcatggaagaaaggatagcagggagctgggaacatcactcttgactgtggttcagcacacctggagcccacggaggcaggagcccaggacatccttctttctgtaggtcagagacctgggagtgttgcctgttctagaagaggaaagtgttcctgatgttctcaacccatcaagctgggagcagatgtttgacaaggagagagaaaaacatgacctgaagcgttcaggcattctgctttttttccatgctagaaaaagaactgtgtttgatctatagcagagttttttatttgagcagaagctatctaggggcatctactgacacatgatgctgactagggtatgattctgtcctcagtcagttcttaccatgtaaaagatcctcaaaggaaggatctcttccccaacccgttgctactttgctttctgaaagtcagtgtttccataacctgacttttgagtctcctctgtttctaagattgtaaaactagctctccaaacataaccacctcttaatagacaactgtagcttcctagagaacatggaaagacaagatatcacagttctggaggcgtttctcttatacttttttttgtatttttccaattttatagaatgaacttgtattattttttgcaatggaagataacttacatatttcagcagcagcaggactgcctctgttcatgagttcttacttttgaattgacatcagataattctgtacttgggaaactactctggatgtggcatccatctcagtcttgggtgggactttcaggtccctggactctggccccttcccactacattgtgtgtatccgtgtgctgtgtgcgtgtgtgtgtgtgtgtgtgtgtgtgttttaacactcatcttctgtttgaatcaagacaacatgttcccatctcctgtaccctccctccccagcatgtgtaccccccacttattcttggagcaccccctccttccttctgcctctgtaaacctgacccatttgtcaagctcatgagcacctggggccatccacacgcagccctttttttctctgaattgttactgcccttatgatctgccataatcacatgctcggaatgcacgtgaacgggcatttgtacagctctttgcagttttcagaccaagtgcacatctattgcttcatctcagggccatgcaagagctggatgagatcctgtcattatttaaaatttagatattttattcatcataaaaattttgcatttgggttaacttttaaaaccattgcattaaaatagtacttgtcttgatccctgagttgtggtggccttgtaaattttgcaggccagtcccaaccctgcttcatttaatccttgtaactagaagagtcctgtgaggtgtgcacaggacctcctgtggtattactggcccatttcacaaataatgaaactcatctctcccactggattccaagctttgtgagggcagctctgtagttcatactcttctaaccttcccaggtcaacatggtgctacctgttggttcatttatttcaaggtatagcaatgagatggggagaggtgtgttaatcagcccttggggggaccatgaacttgtcaaaagtccaattattacccctaacctgtctgattgcatccatccatagaccccattgcacttctaggaagcaaattttctctgctttagaaatttagtgctcatttggtgagagagttacagaggctgtcagatagggagtatgactgaagaaaagccacttggggaacctgagggagttcaaaaattggctggtcccaggagcctctgtttgaagcaggaatgagttccttgagacgaggctaatgtctctctaaaagcacatgtgctagtgattctgagatgactgtaaccttgaaggtttgcttgtatgctcgtgtggcactgagatgaactttttggagtcacaagtgaggttgtatgtactgaaaatcttctacccttgaaataagaatgcaacagtgtatgtctctggatgtgattccatttaactgagtgtaatttaggtggacaggattaatatcttaaaccaagatgtggagactttctgtatcatctcattgcacagaagtgggtggggtggtgaggcagtaggtggtgtccttgactgccaacttttcctttgttggtctgaggtcattctgcctatttgaggttgggagagaaagcgtggataagaattattaccttgaaaatataagataaggaaataatgtgaatattattcagcaataaaaagacatagtttttaagccacagaaagacctggaggaggcttaaatgcacattgctaagtgaaagaagctagccagtctggaaaagctacatactgtgtgattccaactatatgacattctgcaaaaggcaaaactatggaggtagtaaaaagatcagcggttgcaagaggtctagggagatagaggaagtgatgaacaggtggaacccagaggaattttagggcagtgaaacccttttgtatgataatgtaatggtggctacttaaacatcatgtagttgtccaaacccacaaaatgtacaacatagagtgaaccctaatgtaaactgtggactctagctgataataatatatcaatactggttcatcagtattgttacaatcatatcaaatgttccacacgaatgcaagatgttagtaatgggagactgtgtgtgtgtatgtggtgggggtgggggagtgcaggtaataggggaatgctctgtactttctactcaatgtttccataaacctaaaactcttcttaaaaataaagtttagcatgaaatactaggttttatttaattgtacattttaaaataactaaaagactacataattggatagtttgtaacacaaaggataaatgcttgaggggatggataccctattttgcatgatgcgattattatgcattgcatgcctgtatcaaaacatctcatgtaccctatacatatatatagctactgtatacccacaaacattaaaaattaaaataaaaatataaagtttattaattagatagaaaggcagaatgagagaaaaggagaaagagaaagaaataacaaacatggcctatttgcctcatgttccaacaaagggtcttggctccaaatatcacgttaggggaatggaaaagacaagttgggactggctgaggcctggctccttcctatgtcgagtctattgcacagcacacgccggctgcttccatcagtcaggctagaacagcagaattcccatctccacaccaccacccatccggcatcagtcaaaaggagctttcgataatgtgagtcatgacggaagcttcttgacatggtgaatgttccccaagggatgtcaagtgtgatccttctcctttgcagagcatatgagctgcctcgattgtgtgacaaatattttcgtgtgccagcataatccgaactttggcagaggctggggtaagggcgcagtgacagagaagtgttctcagagcctggcagtgttagatttagaaagaagggatgcattttgcattcttgacacaggaatcctaggaagtgactcttcttgtcttagaaacaggatttatcactaatgacaaagagataactcatacttcagagaggcttgcagcatacaaggcactaatgatgacaacaattatgaaaattatgatgatgaggaacatgatgatagcaacatgcctctaaagtataccatgaggcaggcgctggtctaggcactttataaacataaatgtatttaatcattataatggaggtagtgtctatcattatcccattctacagatgagaaaaccgatactagaaagagtaagtaacttggataagattgcatagtattttaggtcaagattctgtggcctttccctcaactatgtaacctctgatcattccctggtcatagctaacagttcaaagcccggtattgtcacagccccagaggcagagaacaaatagctatcacctggaaatacctacctacctacctacatataggtaggtagggtgaataatgtcctcccaaagacgtccacatcccaatcctcagagcctgtgaacatgttactttacatggcaaaagggacgttgcagatgtgattctgtcaataaccttgagaaggggagattatccgggattacccaagtgggcccagtgtaatcacaaagctccttacaagagcatggcaggagagttagtgtcagagagagacggatggggtgggaaaagagagtgagagagagagagagaacagagacagaagtcagagtgatggggccatgagccaaggagtgcaagtagcctctagaagctggaaaaggcaagggaaagggtcctccctgagaaaccccagaaggaatgctggccctactgacaccttcatcttaggacttctgacctccagaactggcagaagcaaaatttttgttgctttaatccacagaatgcatggcagtttgttatagcatcagcaggaaactaatgtacacacataatatataaacacataacacacccccctccctgtaaatgcttaccacctgcaaacctttacatatacttagtgcccacttgctcccttagggccacgcttgctgactgcaacctcttggtcctttgtcctttctcctggggctggttcccccgtgtggctttcctccttcatggccacaactccctccacccaggggaccctaattctggttctccagccaccctattcatttttgcctcatattctaatctatgcaacagaaaatctgtattgctactaactttatcaaggaagaagagggtggacaagtcaggctgtggccctactggggaagttggacacctcttttctagttcttgcctctgcccttgtccacctaagtgtggagctggatatttatctacactcaggtgcccagggcagtctggattatgcctgttgtcttggtgtaaatattaatattacaagctctccctttcagtctgaaatgtgacctgatttgtgtgataaattacatggttgccccatcttgactcacctcccagttgtctgaatttgtcttagtccccaaacattttaattccaggctgacttcctcctgccacccggcccacctctgaaaccacctccctgaattatgggatgcccaaaagactgtcaagctcaaatccttagttttacagaggaggaggctgagttctcaagaggttaggatcacacaggagtcaatgccatgaccaggccttgagctcaagaatcctgacttcacccagcgatgctttcacaagactcacatccttgatgcacgctgagggagatgcagaagctaaccacggatgagggcgtgcatcagcaaaatatctgtgtggtttggctgtgtccccacccaaatctcatcttgaattgtactcccataattcccatatgttgtgggaaggacccggtggacaataatttgaatcacagggatggtttcccctatcctgttctcatggtagtgaataaatctcacgagatctgatggttttatcaggggcttccacttttgcatcttcctcattttctcttgccaccaccatgtaagaagtgccttttgcctcccaccatgattctaaggcctccccagccacatggaactgtaactccaattaaacctctttttcttcctagtctcgggtatgtttttgtcagcaacatgaaaatggactaatacaccttgccagcctgcaacctgaatacctggaattctgtaatctcttgttagagggtatcaattccctgcttgaagtctttgcttttgtcatgaattgaatgttcaaattcatatgttgaagctctaacctccagtgtggctgtgtttggagatggggcccctaagaagggaattaaggttaagtgaggtcatagagtggggtcctgagcttttaggattagtgtactttaataagagacaccagacaactctgaatctctcctctgtgtgtctgtgcacatgcaccgaagaaagaccatgaaaagacacagcaggaggtggctgtctccaagccaggaagagactgcacaccaaaaatccatcagttagcatcttgatattggacttccagcctccagaaccatgggaaaataaatgtctgttgttttagccactcagtttggggtattttgttatagtgacgtgagctgactcctacagctgtgtcccattgagtccacctctttgtggcatttaagcccctcaacatgcactccctccctttcctgtggtctctcatgctcccatccatgcaccataaactcttctcactactcactcaatagggcaccgatttttccaaactgtgtgcccggctgcacgagtcttgctggctttttatgaccctctaccctggagccatctctcccagccccacaagttaaagtcccaccccaggctaaggcctggttgcaagactgctttgtccaaaggcctttccctgccctcagccagaccgagccttctgccttggaggctggagtaagctgggtgtcacaaagccatgagcagtgggttgtacattgtccccacaaagttcatgtccacctagaacctcagaatatgaacttatttggaaatacggtctttgcacatgttataggtatttgatttcacacctgtctcccaggacagatacctcaacctggatagcatggggcctttcctagctcccagcaccccatgagcttgcaaactgtcacactgcactgagtcgaagtgaatgtccccaggcagctctctcttaccacccctctgcttgggggcccagcggctgggtctgtgtttcacatcatagagtctgtgcctgcctggctcctgggatgtgtgaattgctggcagagcaacgttagaattcctaacaagcaccccggtttctccatctgcttgttatgacttgtctcttagaaatgctctcaggattctcataaaatggttcttccaggagaatttaatattttcctccagaatctgtttgtcagctctttggagcctcacccctcaagggtacaggtggctccgagcacaatttggagaatgtcacagagattcatctcctaagagcccccagactcgtgtctgcctgcttttgagagcaagtgttttaagtagaactagaggagcagaggagggacctcaggtcactgcagagcctcgggagctgcacaacagctgacaggagtggattcacttgtgaacaatgttgcctgagattccaacagtctcctgggagtttcagagacatttgtggaggctgagatccagcatgggcccatgaggatgagaacctgaggcttcaggttatcactgttaatgtgactttttgtgcccaagaagtgggaggaccaggaaaacttccacaagtgagttctgagaattataaaagatgttcaaaactcatttaaaagaagattttagacaagcactgcttaagctgaggaaaaaccaccttgtctgtaagtaaaccacgtggcagtttccaaaggctcaccgtgatcctcttatcactgacaggcatccatgtcttaatgcctgggaatgacatacatggaaactgtattctcagtgtgttgggttttcatcattgttacatgctgttgatatgtcattagcacagaataacaagtgcattagtcaggatgcactattagcaagtaatagtatccttcattgagtgtccattctctgagacaatgcacaaatgcattatcaatattatttcttctaatctccaaaacaagtctttgaggaaggtttatccattgcacaggtgcagaaactgggggtcagaaaagtagtgccatggtctgaatgcctgtgtccttcccccaattcgcacattgaaatcgtcatccacaaggtgatggtactaggaggtagagccagagattattggatcatgagattggagcctaatgaatgagattagtgcctttataagataggctcaagggagcttgcttacctcttctaccatttgaggacacagtgggaagatgctatctctgagtaagagaggtggccctttccagggacagaatctgccttgatcttggacttcggagcctccagagctgtgagaaataaatctgtggtttatccgtcccccagtctaaaatattttgttatggcagcctgattgggcaaaggcctgatgaggcctgatctggtcctacaactctttacagcctagccctccaagtggtcaatattaatcagatgaagttggtgttgacacagaacatgaagcctctttgccctcctggtgatatgatgcttcctgtcttggtgataggatgctgacccactggctacttaaactagaaatatgagcttccacagggaggaagggttggggcagagggtattctagaaatgtgctcagaactcaggtggaccaagtgacagaggttggcacttgaaccccatgtgcttcttcctgttggggcatccacttggggatcccaagacagatgagtaggcccctcctcttggatatgccacctacaaattccatgaatgtggcttagaatggagaagactgtcagaggccatctcctttcagaagaaaataaggtgcctctggacactgtcgtgtgccccacaattcagctgaacaataggccaacagtcatgagtgcagctaccccgattggtggcctcaaagactatatgcaacaaatggttccacttttctgctctcatctctgcctggctaaggccacctgttgttctagcatggaggaaagagactgagtcttacagcgagattcagcagagattggctcttgaatttgctacttactaacaccatggccctagacatcttatctaatttctctgagtcatggtatcttcattttaaaatggggccgttgtgaggattatacctgaccagatacataaagttcctaacacagatcttggcagaaaatagggactcagtaaaccatggcttcaagttttagctatgattgtttagagttactttctctgtgtctatattctatttttccagcagacaataaattcctttaaagccaggcactcctctgagcccctcacagagattgctttgcacatagtaggacctaataaacacattccccaaatcagagttgatgttactcatttttacttttggtctcagttgacctggattctgttctcttttgtcctctgaattcaggccagcatctcagaaaatagtttaaaaaaaacaacaaatgagcagggggttagaaatttgacatctcccgtagactgtgaaactaatttgacatctcacatagtctgtgaaactgattgactagagctgtataaaaacttgcctggaaaacttcttaggaagagctgagacttgaaggaactgggggtagagggggctgaatagtataacagcttcatgttcctcaaggagctctacatccctggacacacagtgatgccccatgacaccttttgggaggctggccaggggtcatactcactcttcttttaatggggatctcataatacatgctgactgtttttacagtggggcacgtcaaagaaaggcaagaaaccttattttcttctgaaaggagatgacctttgacagtcttctacattctaagccacattcatggaatttgaaagtggcatatctgaggatgggtctgccaatctgccttgggatccccaaggacatgaatgtatttgtttgggaacttgaagtgaatttcaatggacacagtcatgctgggaaaaaacagacaaggtgctgactaatgccatgggaatctaatactgattacttttgaaagcacaagggaatgggcctacaaaaaagtcagtatacaaatctgaaatggagttagaaagaactggaaaaggaagtatgagaaatattaattaaagttacaagtttgagactagtcatggaaaggtcagaaatgttttctttaaggtcatggttccatcagtagtgactttaattaataataatagggttggagaacctctacccttatccctgcaccattaccatctcagataggaagatatcttctttaaggtcatggacagaaagctaatgggattatgatctggctttcatatttttcaagtacctattgtgtgcaaaaaccagaatttgagaaggaagatctgttattgctgaaggcatttgctcatggagttttaataccagtcagtggttattgatcacataatgaagcagttcatggatttctagttttcctccagagttctgcattacttttagacaaattatattcttcaaagtacttgtcattcttgccttgatgaaaggtgaatctatgaagatttaacagaatttgggcccaattccagtagctagccatggaacatggagcttctttttgatctttttgatatagtgtatgatgttccctctaattttctttgggagtggttactaatataaatcaataaaatactgattataatgtccttcttattcgtccccccacatttgctcagcatacttcctataatttgaccaatgtgcctgtgaaagattgtaaaaatggccacaatgctcttataccactcttcatatttatgacctgtgcaatgtggctttacagatgtgttcaataagagacagttctgtttccccatcccttggatctgagctgacattgtgattttctttggccagcagagtgtggcagaagtgaaaaaggaaggtgtgtcagttcttttcctttctgagaaatctgcccaggtgccatgtgtataagcccaggctagcccatttgaggatgagagaccacgtggagcagagataagccatcccagccagccgcagctagcttgatcactgacctagacgcatgtgtgagccctgccaagactagaagaagaatcgccaagaggagcccagctcaaactgctgactattgagtgactcatttttgggatggtttgttatgcagcaaaagtaactaacagtacctaagagtggttttctgttctctatcaagagccccctttaggaaaaaaatgaccggtattgtagagtcatcatcgaaaagattgaagcttcttctggaagtttattatttcactactctcaagactcttttccacagtctcctctctcttacttccaagtcttccttgcagctaggcatggtcatggaatgtaagtggaagttggtcaaaaaattcttcttgaaaaagggacatgtatttttttgtactctttttctccttcttcctactagagatgcaattcctggaccacacaatgcctttacaccctatttatggagtgaattgtgttcccccacatttacatgttcaagactcaacccccagtgtgactgtacttggacatagagcttttaggaggtaactaaggtcaaatgaagtcatacgggtggggtcttaatccaacgaaattggtggccttataagaagtagagagatctcttttaggaaaggccatgtgagcatgtagcaagaaggtggccatctgcaagctagagagagagagccctcatcagaacctgactatgctggcaccatgatcttggacttccagcccctagaattgtgagagaatagatttctgttgttgaaatgacccaggctatggtattttgtcatggaaacctgagcagactaatacaccctctgagatgacacacttgaggatgaaaggttaacttgttaaggttagcatagatgagagaaagagtctaggtcttcgacggcatccttgcacagctgaatcaataccaatcacttctaccaccaagtttacattgcatggaaagcatactcctccctgtggtttagtgcgctgtcgaccagtgtctctattacttgcagcagaaagtcctcctaagtcatgcagatagatataattctcctctaggtgagaactttaggtgtcttaggcccctttggacacatatgcattagtctgtggtttgagtggaaggtcagtggctctatacacttgatagcacttgtgacttcaaaggccgctacatacccaggtgtgtgagtgatagagttgggggaagagccagagatctatgcaggatggggaaggatcatcgcgaacttccaatgagtttgggataaagtaaggtctagtctcagctctgaccagtctagtctgtctttgatgggtcagactcaagtggtccacagaactcatcccttcaaggctaaatgttacattccatgtttaaagactctgttgcatttgaagtcagcatcaatcttagtgctttttggggcacagggttgcaacactttgaattgtgactaggagatatgttttcttcagctttggctgcatcaaggagaagatacaaatttcttagatgcggatcaaaggaagatgaaaaggaaatggaaaaagcaggcagtaggggggcatctgtctgtcgtttaccaccacacaaaactaaaaaccaacaataactagcatttattattgccctctttttgccaggcagcaataccgaatacttcccatgaattgtcttatttagttctcaaaataaccctatgttccaggcaccattattatccccatttcatagataaggaacctgaggtttagagaaattaaataaccttgcttaaagtttcacaggcctcagtgggggcagagtcaggattaaaaggccaagtgccttcactctgcgtaggtttttataacaaaaccaatcgatttagaaccagtgtggatttctgctacctgtaggggacctatatgtgactaagggactgtgactatagtctctgcaaaatgcaagagtgatatcttgccagagaatgtcttcatttctgctcctcttttgcaaggatttggagaaaactttgtaaacaggactgaaacagtaaagctaatcacatcacaatcacatgcccaccgtcccaaaggatcatactggtgtttgctaatgggaatcctccctgttcaaagtttaatacctcatccaagggctccacaattacatttccattacttcccactgtttatcacagttggattgcaaaagccaatttacgttgtgatttctcctctgctagatctttaccatctatttttaaatttgtctcacaatccagctgggcgcttcatcccaaagtgttggctccatggtgctgttggaacattggccctgggagggaccttgtcctccagccacaccgtgtctgctggaccaggcatgaggtcatgggaggacctgcgtccttgaatacgtctccagctccttctctctcctctggggcagtttctgattaaccttacatttgggggcatttaataaaatagatttccttgtgtattgtaaaaagaagaaaaatgatagtgttactcttgaaggtctctgacctggggtttgtgaaccagattcaccctgaggaaagaaaagcactttcatcatctgactatcccccgtcacagttcttgtggtccatgcaggggtgacctgcacattgagctggggccaggtttgccggggctctgggagaacaagcacattgtcccctgacaagaggaaagaaaggtttcaagagcccctttagagatgggagggcagcctgggtcagcaatatttttgttggcacaatcttagttctaataaaagaaggaaccagcgtacataaaagaaaatataattctagaatgattttgaccatagctgtctgatatttgaagaggttttcttgacgggagattttattggccacctgtcttcctttctaatagttctctaaggtggcaggtgaataaaatatgcctgccagcattgctttcctaatctgttggcaaagattgattttttttttagcctgctttaaaaatgttcttttttattgatgcataatagatgtacatagtttcagggcacatgtgataatttaatgcattcatataatttgtaaagatcaaatcagcgtacttggaatatccatcaccataaatatttgtcttttcttgatgctagaactgttccaattcttctcttctagcgataaaaatgttgttatatcctcccaccttatttccttcaaacgaattgagcagggtttttaaattgatattggagagatgtgactttctccatcagcggtccagttgtaatgtggtctatttaattgctaacgaatacacagaggtgcacattctcctgggccagtaggtttatcagaagacagaataagagaaagaaagtgaagaaatacttcagcccatgggctgcaaatgcttgtgcatcagctgcaaccctcctatctgctgctttgtggtcagttagtggtgttttggcacaagcttcaagtctccagcaaaccctgcccatctctagttcagtggatctcagttcatatgctggctgggccactagctgcccaaatcaatcactacactaattatttttgtttcctttaaactcagttcccctctctgcatttatttctgtggccgactgtgaaaagcacaatctctctctttgcccatttccttgaagatcaggatgtttaaaattttccagcaacaaagcaaaactttatgcaatattatgggaaaagcacagattctagagtccagtagggtaggagaggaagtagagggagcaagtggctgagatttattgagcaactactatatgctaagggttgtatgcttattgtctcatccactcctcatagtaggcttagtttacattggcattgttttgaataaggagcgggagtctcagccagggtaagtcacttccccaatatcacacagtgagtctagggagcagatctctgtgacgagatctgcccattttaatcaaggggcgttttccagtaaagattacaggacagaaggcacacaaaagcacactggtaagctcggaagcacttcatgagagttagttgctgttgcttgctacgtgtacattctgttggttcctggaagttctgctacttccactacatagattggtcaaggccctgtgttgtgtgaggcttggtcacaaggtgagtcagtaagccatgaggcccctcctctaaagatgtaccagctaagggtgctccggggggactctgatcctagggcttgtcaactccatgttgagacctcatcagaacctgtataaagtcattctctctgtgtatcaggataggatggcctaaccctgatgaagctggaaggaatttagagttagaaaatcttcatggttgaagtgttatttctagaatgttccgtatccattaaataacagctctgtctttttgaaaggctgacttctcatggcttgtcagacaaagcaggttatttcatttacatatggaggaatggtgcaggttgtgagtgggtgttaatacaaccagagggcccacactatgaagacaaccagacctgtgacaccatgagtcacctctctcccccaaaacccttcagccttcggctgagatgcctttggtggcacaggcagacacaacggaattaaaagtcatccctttcttggcacatctgttctggatcaaaaggcgtggttaaagagtgagagctattgtgaaccaagatagcgccactgcagtctggcctgggtgaaagagcgagactccatctcaaaaaaaaaaaaaaaaaaaaaaaaaagagtgagagctatcaagcctctaaggctccctaaatgccagtctctctattaaacatgtgatgtgtgttattattgcttttggtcctggcaagaatcatgcaagagtggtgctagttccatggcaatctgaggcataggggtgttaagcacttggcccatggtatatataaaagctggggctgagactcaggctagtctgatttcagagcttcagatcttacacacatggacacacagcttctgcaagggccggtgcctaactcaccatgtgaagtgaaagtttgcttaagtaagttaataccatttgcctttaccataaatggaaggcaggaaatgacacaggcatgatgaaagtaaaggataatgcatctattttaaaaatgccatgtagtttagtgcattacttttcaaacttttttgacaatacctcacagtaagaaatatatttgttattgtgactcagtagaaacactcacatatatgtgtgtgcacgcatgtgtgtgtgtgtctgtgtatgtgtatggacccaaaccaaaagtttcatggaagagttcttttttccttaacatgtactctgcactgaaagattttctgttccatatttctctacttcactgttttaaagtgctggttaaattcatttcatttctccatctgttggttgtgacccttcatcatacatagatagtggttaatgggggccatgtctctggaccagactatctgaatgggatttctagatcttccacttcttagctgtctaaccttgagacaattccttaacccctcatgcctcagtttcctcatctataaaatgggcataataaaaataataccagttcaacaaggttgttatgtgaattaggtaaaataaggtatatgaagtgcttaaaccaaagactgggaaaagcaaagacctcactaatgttagctgttagttctttatcgttacacatgactttcaacaacgtatttattttattaggtgaggcactcatagctgctgtgtaataaccttttaaaaaaattctttctccagcaaactaacacaggaacagagaaccaaacaccacatattctcattcataagtgggagttgaacaatgagaacacttggacacagggaggggaacatcacataccggggcctgtcgggagttggggggcaaggggagggagaacattaggacaaatacctaatgcatgtggggcttaaaacctagatgatgggttgacaggcaaaccaccatgacacatgtatacctatgtaacaaacctgcacgttctgcacatgcatcctagaacttaaagtaaaataaaaaagaaaaaaaatagaaaaagaaaaaaaaaattaaggcagtgggcatgtacgagaagaatgcaattccgcccatgaatgagttagaggtctgggtaaagatcatgtaaaactccacttccctagctcttagagacagtaaggctggtatgaagtaggtaaccaaaaacttaaaattcaaacattgctctacatgttagtttaatgtatattcataatacagataataggtcatcaagagaaggtaaaattatacttagcctaaactaaagaagttgaggaaacagaacacattttagaaaaacttccatcaggataatgaaatgaaaccaaattgttggcgcagatggaggtaaacttctgtgttttagaagattgatttgtgtggaggtgtcctccccagcatgccttcgggtgatggaaggtcacttacaatgtgtacagcaggaggtgctggggtgaggaaaattagggcaagaggaggctcagctaaccctcaggcttccctttttaagaaagatatgggatttccttgggtcatgtcctaaagaaagtaagattgccacatagagggctggacatggtggttcatggctgcaatcctaacactttggaaggccgaggcaggtggatcacctgaggtcaggagttcgaggccagcctggccaacatggtgaaaacccgtctctactaaaaatacaaaaattagccgggcatggtggtgggtgcctgtaatcccagctactcgggaggctgaggcaggagaatggcgagaaccggttgcagtgagctgagatcatgccattgcactccagcctgggcaacaagagggaaactccgtctcaaaaaaaaaaaaacaaaaaaaaaccctgccacatagaatgcaaccacattttttctgagggttaaaaaagaaaataaagaaaaataatctctttagggcctcaagaatgtttttgaggtggtattatttttattatgcccatcttacagatgaggaaacaggcatgagaggttaaggagttttccttagccacaatcttgggcatgaaaccctgggatttctcccagttttgatgtattataatagagtctcatcctgccccttgcaattgagatgtagaagaataatccgttctatgggagcctgaggggaagggcagccatggaggactggagtctgttgggagagagcagcgctgtgatcggcttctatgctctgggtttacatttgccgtagcccgtggttgcatccagcgctttctccctgccattttttatggccctgcgtggaggtgaaaaggcgaggacgatgccaagatgaatgagcaagcctgaagtcactgttctcagctggatcaacagccttcgctctgcctgttcttaggagcttggtgtgttggaaacaaagcgaaattagagtgatattaaaataaatgactccattaaaatggatcaaccccgtgagcccaaggaaagactgacttcattttgaaagcggcaaagtggttggtatttcagaagcctaaggtggcaggttccaggccagtagcctgacctgaagggtggcagatgggaccaggccccatttcatttgcgagttagttggatctgactcacttgttagcctcggttttgtcctatttgcaatcaagtgcttggatgagacttttctgaggtccctcctggttctcatactgagattcagggtggtcagagtgggaccctcccctcattggacctcaactgggcctcctggaagaccaacttcccagatgtagccctgttactataacttggggtccctgtgtccctgtattatttgtcaatacagttgcagttggcctctctggggtctcctttgagtgtttgtgggctttctttctttctttttttttttttttttttttttttgagacggagtcttgctctgtcgcccaggccggactgcggactgcagtggcgcaacctcggctcactgcaagctccgcttcccgggttcacgccattctcctgcctcagcctcccgagtagctgggactacaggcgcccgccaccgcgcccggctaattttttgtatttttagtagagacggggtttcaccttgttagccaggatggtctcgatctcctgacctcatgatccacccgcctcggcctcccaaagtgctgggctttctttctttttttaagatggagtcttactttgttgcccaggctggagtgcagtggcttgatctcagctcaatgccacctctctgccccctgggttcaagtgattctcttgagtagctgggattacaagcatgtgccaccatgcctgtctagtttttgtctttttagtagagatggggttttgccatgttggtcaggctggtttccaactcctgacctcaagtgatctgcccgcctcggtctcccaaagcactgggattacaaggcgtgagccactgtgcctggccttttgtgtctttttgtagttaccatgcacaaggatttagtgtgagttataaacaatgaaacaaaggtaatttttatgtaatcatgacaatccacaaaacccagtgtctggagtgaagggaatgacagaataccaagttttagagtctatctttatacggctgtatttccctgacagaattataacaccaatgaaaacatgacagtgacactgttgactcactaccaactgacattttcccgcctgtggtttgcatttttttttttctaaccagtctaccacctacaacagagatgagtgccagatactcacttttcaacatcctcacaactcggggttgcctgtgttttccagtcctaagggaaggtcagcagataagtgggtagaggtgaaatgaaagaggggattctccctgctccatcccacgtttgcacctggttgaggcaggatacgatgtgtggagctatggcagccttcttacctccaagaggggaaggccgaaagaagaaatgaagggaaatgggtccaggcaagctctgagaattttgagctactgaactggacaagttacctttggattttttgtaggtgggacttattaacaatcctccaatattgatatcactttagctaaacattctctcagttgcagtctagagcttcctagttgataagctatagcaaactccttttaggtcactcctctatactgagcattggtgctaagggctccctgttttatcattctaataatacaacaacaatcccagaaagtgcatttattacaagccctgttttacagacacaaaaactgaagcctagagatgggaagtatctggccttggaacacgtggttggtgggtggttgaggcaggacttgagcctgtgctttcaaattcctctgtgcctggggcacagcggagcaagcagcccctccacatgggctctggagaagcccaggaagggcactagctctgctttgagtcctccttcccactagcctcatgtcccatgagtctcactcctagtatttccttaggaaggcttttggggagctgtgcatttgagtgcagttaccctgtagtgctgccccaagagaaagaaaacatatgctcacacaaaaacgtccaaggcagtgttgctcacaataaccaaaaggtgaaaacaactcaaatgtacatcaaccgatcagtggataaacaaaatgtggtctgtccaggacggaatatgattcagccataaaaggaatgaagtactgatctgtgctacaacatagatgaaccttgaaaacatgcctagtgaaacaagccagataggaaagaccatagatggtgtgattccattcataatagggcatctgttgagacagaaagtagatctgtggttgtttggggccggggaaaaggtgtgggaaggtgatagtttaagaacacaaggcttctttttgaggtgatagaaaggttctaaaattgatctcggtgatagttacacatatctttgaatacacctaaaccactgaattgtacaatttaaatgggtgaatcgtacggcatgtgaattatctcaataaggattttaacttttaaattcaagggtacacatgtgcaggtttgttatataggtaaacttgtgtcacgggggtttgttgtaccgaatattttgttacccaggtattaaacatagtacctattggttatttttcctgatcctctccctcctcccatgctccactctccactaggccccagtgtgtgccattcccctctacatgtccatgcattctcttcatgtaactcccacttacaagtgagaacacgcagtatttggttttctgttcctgcattagtttgctaaggataatggcccccagctccatccatgttcctgcaaaggacatgatcttgttctcaataaggatgttttcaaaaaatcacagtgctgcctaggaggggaaatgccttagccagtcacccaacacatgtaggctcagcctccagcagctttgaagggggcagaaagggaggatgaaaggcgggaaggctgggagaagctggggtcagggagatctgttagctcagcatgacccaggaagaggcaggagaggaaggggtgaattcctttccttctttcactccgttgagcaaagtgagtctcctctacacagtaattatgggtcaacaggcaagagcaagttcttctgcttgaggcagaaaaaataatgcctcagtgaactgcagcttagttcacaaaactttgtgtgaataaatcagatattcccattttgtaaaaagatataaacactcaggaaatacctactcaaatatttgttctaagttctctcgaaatgtttgaggtttccagaatgtctgttacatttcttatatgacatttagaagcctcactgattatccttgacttatatatatttaaaatgtggtttagtttgggcatcttcccagaagccctaattttgagagagcactgttacaatagatttgtcttcctggttatttttcctatggattctattttaaagttacaattttaaaattattatctatgaatttcttcaaaaattcctacaaaaaactatgaaaatgtgttttttagtaagagaggcacccaaatgcctctatctgttaaaccttggactcctcacccctaggataacaccatgaactgcagacaaatgtatctgaggcatttgtaagaagtggctcattccacagctataattctcagctaaagtcctggaagaagttggaaatggagcatttatcaagagcaaaaggaagacttggctggaacaaaccgtgccctatttccctggaatggagacttcttcagaggtagctgggcagaggctgagctagcatgacacaccaagttgcccactgagtccacactgggttctagacagagaggatgtggcgtgggatgacctcagggtgttggagaaaggccatgaagaaatccacttaaataaaatagggacccaaactttatgctggacaatgaaaatgtccagtgttacattgtggggactttatcccaaaaactgaaacaaaaactctgaaaataagttatctgatattaaacataattttggacgtagttctaaccaagctaccgttcttagaaaataagcaggaattaagtgttgattatttctcatctgggtgatttttctggcaaaaatccacattagtacaattaaatagcctctcttttatacagagagcttatcagcaagaccataaagaaagtcggttttgcagagacaggcaggggctttatttcctgaagggccgctgataacccttgataagcatatcattctctctgaaggcacatcctgtttgccatcttcctgatcattttctcctcttcagtagggaatgagttcgtctctactaaatcatcattgtcagtgatgtaccccccgccaagaggggcggaggttcccaacctcccagcccatgactttatgaaattccacatctgtcacaagattgcacatcttactttgcaaggcatttgcactggattatcgggtaggatcctgactcagagagagactgaactacagggaactggatgcctctgcggaggttgatgagaggtagggaagacggatgttggggataagggagagggggactcgttgttaaagatggccagttcatagggagtatccttgtttaggacaactttgaccgaacatactcaaccttctgacttttcagaatcagatagctggggttctctgcatatcatctggatttttgaacccaaccctttggcctcagtttcctggatattttggataaaagcacacccccattttgcctgagttatcttgcaaacagccccgatttttggcttcatttattgtctgggttttgataccagatgaacatttttggagcatccactgtgtgcaaaactccaaggagccactggggcttctgcagagcccctgccgcatgcttttctccaagatgccatctggagaaccccatcctgcacagtttcaagcagcacttctgggacgcttggttgtcctgcctctctggtgaccccagctcttttcacatcactttgcttgccatgcacaactgcaattatttgtgtgccagtctccctccacttcaccctcacgggcagccccagggcatgggctcaccaccctccttgggtctctacttgtgcttttctccatcactgggtaacgctgagcgaatatgtctccctgactcagcttctcccagccttcccacttctcatcctctccttctgcccacctcaaagctgctggaggctgagcctatgtgtgttgggtgactggctaaggcatttcccctcctaggcagcactgtgattttttttaaaaaatcatccttattgaagtggaggtgtggacccctttcccgactcagaggactgtggtgaggacaaggaagatggcatcaaaccacttgcattttatttggtatttctcaaagccccttaacatcaactatctcaacattattccccccagtcaccatgtgtggtaggcatgaaagatactgtccctaaagtgggttgataaagtagtagttagagtgactatgctcagagaaggtgtgatttgcccaaaattatacaacttgtgagtggtgaagctggagccaatgccaaattcttagttatttccacagaaacagggcacatttagggctttgacatcaccaactttcagagcctattactacctatgatgagaaggatatagcatggcgggggtgaaggatccaggcatccttccattcatttcctcatcctgtggtcctttcttagccttccctctaagcaagaagcagttgttgcaggggggaacaccccaagcttcccagtgtccaggcctgggagactgtggcaggctaagcaatgtcctcccaaagatgtccacttcctaacccctgggacccgtgaatttgtttccttacatggtgaaaaggtcttgcagatgtggttaaaggaaggctcttgtgaaggggagatggtcctgggttatccagagggcccaatataatcacaagggtccttataagggtagggcgggagggacagaaaagaaaaagggtgatgtgatgatggaagtggagagagagagattggaagaggctatgctgccagctttgaagatgaagaatcaggtcaggagccacctctagaagtgagaagaggccagaagatggctcctttcttagagcctccaggaggaacccatccaggccaacccatgttagacttctaaccacaaaaactcaaagggaatacatttatattaggtttttgttgctgctgtaacaaattgttacaaattcagtggcttaaaataatataaatttaggtgacttacagccatccttctggaaaagagcatttaaatcattttaagggtcacgtgagaccatgggcaaacagacctgcttggaaacacatcagtggggagcagaaaggtcagcatagttaaggaatcaagtcaacactgcggtgatagcactgcaggtataaataaatactcgactctcctgccactaggatcctctgccctaggtatttcactcagatcctccactcctgacctgttttacccaccagtctcagcagggctttccgacctggcatggattttgaagaccattataggctggtaaatttcaaatagttgacgtccttggctcatccttgtcaacgcacagcgaactggttaaattctaagcctttgacaatgacgttgaaaattatgttttcttccttagggctggttggaagaacaggaatgcggtggggagcaaaacacccacccatcatcctgtcagaggctattctatctcagtggccacagaactgtggaggaggccttgaagcttaatttcccattttagtgccttccttcagagacagtgctggccaagaatctatgacctcaaatccacacagcacagcatctgcgtgatcttgaaatgtacttagtagaacaagacatcaatccaccacggaaataagtctgtggtgatgctggggctggagttggggcaggagattcatggtatatagtgagtcggccagaatcataattagagcatttatcataattcctgacactctaattggcttaaaagtctcttcttaggacagtgttggacagtatttcaccgtaggaatttgcttttccaggtgattttgtagcagacgtcaccactgtcactgaccattattccctcaaattggcagagaagtgccctcctccctgccccactggggtccatggtgggcacacaccagcaggcaaaacgatgaggaagtgctgtcctatttgcttcaaattaaaatgaacacacgacacctaccttccacatgaagaaataacactatcttccctacgtctgtttctctcttggcatgactccatctgagttgggctcaccttttgactgtgtcctcaccatctcactccttcatgggaccagggacactggatagaggggagggctcacagaaggggcgtccttttggggaaagcttttgctgatgttgcctgcccttcgcttctatccaagtctcccactttgaattttatttctgagctcaaaatccctgtgagcaaaaatactctgcccccagttaaaaaaatggggaaaggattttaatagacatttcttcaaaggagatattaaaatctgccatgagcaccagaaaagatgcatcgttagtcactagggaagtgcaaatcaaaaccactttcacacccactaggatgactctaatcagaaagacagataataacaagtgttgacaaggatgtggggaaattgcaacactcattgtttgtaggattgtaaaatggtgcagcttctgtggaaaacaggttggcagttcctcaaaaggttaaacattgaattaccacatgacccagcagttccactcctaggtgcataccccccaaaattaaaaacctatgtccacacaaaaattactatgtggatattcatagcactactattcttttttaatttttattttatttaactttattttaatttcaggggtacgtgtgcaggttttttatacaggtaaacttgtgtcatgggggtttgttgtacagattatttcatcactcaggtattaagcctagtacccattagttatttttcctgatcttctccctcctcccatcctccaccctctaataggctccagtagaggttgttcccctctgtgtgtccatgtattatcatttagctcccccttataagtgagaacatgcggtatttggttttctgttcctgcattagcttggtaaggataatggcctacagctccatccatgttcctgcaaaggatatggtctcattattttttatggctttatagtattccatggtgtatatgtaccacattttctttacccagtctatcattgatgggcattgttgagtctatgtctttactatagtgagtaggcactactattcacaacagccaaaaaagtggaaacaaccaaactgatgaatggataattatgatgtggtacaatggaatattatttagctataaaaaggaatgaacatggatgaaccttgataacattatgctaaataaaagaaactagacacaacagaccatctattgtgcaagtctatttatatgaaatattcacaacaggaaatccatagagacagaaaagagataagggattgccaggaaagggggcaggtggaatgactgctaataaagacagagtttctttttggggtgatagaaatgttctggcattagattgtggtgatggttgcatgaatttgtgaagacaccaaaacacactgaattgtatactttacaagtgtgaattttgcgatatgtgaattatatttcaatgaaaataattgtatgagaaaaatatcacttctggggagtgatactggggttccaaggtggtcctgtcttctgcttgaatcttaaattgtattattttagtaaagatgatgataaaaataaaaaaaatacgctctgtcaatctgagctgcctcttccttccccatttggcgtttggtgttatcacttcctgagcagctgggacaagggtctcttgctaccctttgcatcctgaattttatttctttgctctctgagcctgcctttctggccatgagccccctgaagtccctgctgtgttcccttcttgtttattgatttgtgttaccaaaaggatgtgactttatttgaaataaggcatttgcagaagtgatcaaattaagatgagttcggactagattaaggagtgtcttaatccaatgactggtgtacttatgagaagaggtaaatttggacacagagaaaggcacagagggatgataatgtgaagacacacaggcagatgtgtggtgtgtgatgacagtggcagagctgcagtgatgcgtctgcaagccaaggaatgccaaggatctctgtcaaccacgaggagtcggaagaggccaggaaggacactcccctagagccttcagcgacagcatgaccctgttgacatctgaattacaaacttctggcctccagacctgcaagtgaataaatttctgttgttttaagtgcccactttgtgatagtttgttgcagtcaccctaggaaactaatatagcgttctaacatgaaatctggcacacggaagcccaaacatgtttgttgagtgaattactcttctgcttctatgtgatctgtgatggctgacatggaaagaagccccagcaactggctgataaaaaatggaatagttagttcctgcttttacaagtgagaacttcagcaagagatgaagttgtttaccccaggtagatagcggatggggactgaggatttacttcagatatttcaactctgagttaatgaaaggagataggaaagagaaatgagcctcttcgagagcctactatgagtcaggcactgtgtatgtggtataatttatttctctcaaggaccctatgttatgagcattcttatccacatttctgcaaaatagacaattggcatgaaaacagagatgggcctctggaccttggatgtccaaggtcacgtagtaaatagcaaagccagaattcccccctccccgggtctttatgattgtaaggtcttcctccccttgatcatgctgaggagatttattgatcagacagctttcaaatatcaggaggacgtttcaagtttatttggcaagtgatcaggatctacttaccttacaaactcaagttgtgaatgaaaaattcattatctccattttctagtcattaactatacaatcctgatctaaattcacaaatataaacattttctgtgatcaatagaacaacgataatattttaatgtgtgcagtgtatttttgctcttttgagagtaataaattgctgagatgagtaatataaccaataaatgaaacataaaaataactaaaccttaaacttaactaaggaattttttgcattcagtttttttcagtgaagtgactgataaaccttctgtaaaggcatataacattcttacagattatattgttttattattttgggagtagtaaatgggaataactttcaataggatatgcaaaccattttctttctcagcatcatttattttaaaaattttgtaacaatttagaaaggttgtttttcaatttctttctccattttctcaggaaattgctatgaagattggcttatttttaagttgctaacctatttgagcatttggggaaagctttcaacagctaatgacctacacttaccccatatgtcgggaacattgagtgtagttagctaatgttatataatctttgcaaaaattattttcattagagtaattactgctatggttgggaatgagttattccatttttccatggttttgagaaatatgaacagaaaagtacaagctataattaaatcaaaccattaaaaagaaatgtaatggtttagccctggagtgagtttctaaaatgtaaaagtcacgtatttcctgaaattcaaagatggtgagagattcaatgtccattgtcatatttaagaacacagtcatgtgtcgcataacaacgtttctgtcattgacgatggacgacagtggtcccgtaagattataataccacatttttatcgtcttttttctatgtttagatttgtttagacacacaaataccattgtgttccaatttcctacagtagttagcgcagtaacatgctacacaggcttgtggcctaggagcaacaggctggaccatgtagcctaggtgagtagcaggctatgccatctaggtttgtggtatctatctaaacatatcatctagcaatttgaactctctctgaatgtatccctgttcctaatcaatgcataatcttatacccatttcatggctttgctccgcaggcccagagctctgttgggagacatggttgtgccttggagcctcccttaggactgacaagtagatgtggcagtagcctgcacctccatgtactgccagggtctgggaaccaaccaggcatccagggttcagatagggggcgagcatgtcctggtgtgacatgcagggaaagttggcagaggatatgtcctgggtgctaccagccacttatggccaattgtgaccctctcttctagaaaaatatttcctctgcagaattcaaggtagccacacctctactataggataagattagcattaattgcttaaattattctatgaatttaataataaacagcaacctgctagtgtgataacccccaaatacattttaacagaatacctaacgaaatccgtggaatttgtcctgttgtagggcatacgagcaaggtgttaaaagtgtcaatcataacattgtgcatgatctcaaatgggctgattattttggtcctgggctatcaagttagctttgccatattattctgagaaatggagctaaagaatcataatctgccttaaataaaagtcacaggcaagaataacactaaaagttagatggcctgttgaaaacttgaatggaaaacgttagcaaacatcctaccacctcctctcagaaatgcacaaagatacatgaatcatccacttgatgaggttatgcctggccttgagtgcactttaaaaaagatagcagctaatccaataataacgctattgacttttccttgtgttaaaaatcaaatttaataatgttctgctttaggccctagatatctaagatgttagaacagaaagattcattttcaagggctaagattattccattctccggtcttatggactgatattggaggcatgaacacccagagacagaagccactcatccctgggacaaaagagtcacatacaaaggggcattggctctgcaagacttcaagcttctttattctcttgggctagctctcccagagagaaggtcttgatttcctttctctctctctcttctttgttagtctttctccccttttaacaggtgctagagaggatgtggagaaatagaaacacttttacactgttggtgggactgtaaactagttcaaccattgtggaagccagtgtggcgattcctcagggatctgagaaaactagaaataccatttgacccagccatcccattactgggtatatacccaaaggattatacatcatgctgctataaagacacatgcacacatatgtttattgcggcactattcacaatagcaaaggcttggaaccaacccaaatgtccaacaacgatagactggattaagaaaatgtggcacatataccccatggaatactatgcagccataaaaaatgatgagttcatgtcctttgtagggacatggatgaaactggaaaccatcattctcagcaaactatcgcaaggacaaaaaaccaaacaccgcatgttctcactcataggtgggaattgaacaatgagaacacatggacacaggaaggggaacatcacactccggggcctgttgtggggtggggagaggggggagggatagcattaggagatatacctaatgctaaatgacgagttaatgggtgcagcacaccaacatggcacatgtatacacatgtaacaaacctgcacattgtgcacatgtaccctaaaacttaaagtataataataataaaataaaaaagatattattattcttagaaaggaaatttgctgtaattttttctgattaaaaagatgatgtaagtttgtttggaaaactcaagcaatatagaaaaaatataaaaagtaaaaatctcagtatctgggatttgggctattcatcatctccattttctcctcctgtggggacacaattatactggtatctcagcctcccttgtagtaggtagacatgagcatggtatgtgtgctgcttctgggcctgattcatttgtagccttccttgcgatactgcatagtctttctctctgccatgtcagactgtcatggacaggtcccccagagtgacctggggatccacaccctggagatgataaagcacaaagtggcagaagcctgaatttcctttccaacccaccacccctgtcactggactttatgtgagtgagaaataggcttccattgtattggatcattacatatctgtgtttatttttcaatgcagcatagcctatcctacctaactagtaaaatatcttaccaccagaaataacaatgtaacattttagtgagagtcattccagattataaacaacacctgtgtgcatgcacacacacacacaaacacacaaaattttttcaagtaggatcatattatacataacacccttttcacttaactatatctggtgcaaatctttccatatattgtgtccatatcacccttacaaatgacttcatggtattccattgaatgattataccataattaaataaattaatttttcattgatggaaatttagtcagtttccaacaaacttggaatgagcaaccttgcatacatctcttggtgcaactggtcaattacagctttaggaggcagggctagaaggggattgtaagggcaagagcaaggtttgatccacattgccaagctgctctccaaaaagatgaggataatctacttgtcaatgaacagtcaataaaatgtacctgtttttgccaccgttacccacctggtgttgtcaaggtatagaatcttggcccatttaacaggaccatttaaatatgagcttatagcagtgatttcacttgtatttcttctttggcttttgatattgacgttattttcatgtgtctattgacccttgatcatttgtgcttcctcttttgtgagtgatttgtttgaatattttgccagtttttctactgggtgtgtgatactgtgatttataataagatatacatattgtatttagcctttattgctggttcctggcacagagctccttaaactcttgtaatttcctgagcaatagcggtgctaaggtgcatcttttgttctaatatttggtctttgactatagttcctgacatagagttcctaatccttgtaatttcccgtaattttattttaatgaggcaactcttggtggattcctggatgggaactgatcatcagagagatcaaaccatgattaaaagcttggaactttcagccctaacccatccatcctccgggaagaggagagaggctggagattgagttaataatcaatcatgcctccattatgaagcctccataaaatttcttgaactccagggttcagggagcttctgggttggtgaacaagaacacatcccatgccaggaggctggtgcaccccaactccatggggataggaacccctgctctcagacctttctaacctttaccctgtgcatctcctcatctgtatcttttataatatcctttataacaagctggtaaatataagtagtgttttcctgaggactgtgagccattccagcaaattattgaactggagagaatcagaagaaccccaggtttatagccagtcagaggtatgggaggatgtccaggacttgtgattggcatcaaaagtgggggcagtcttgaggggctgatgccttaacttgtgggagctgacattaactccaggtagatatgtcagaattgcattaaattgcaggatgctgagctggtgtcagagaattggtggatgtgggaaagagcctgcacatctggtgtcagaagtgttctgtttgagaatggagataaacagtgcttttccagagggagtttgtcttgttcatactaattagctagagcttgtcctccccacttcaaatttgtgaatttttttttttaccagtggaatatgccataaaactgacataactaccaagctctagaatttaaatgatcttggagggcttaagggagcttcttttcaacctcagacataccagaaagcaacgaattctgcagcagttttctggttaatatggcaatgcagacctagggaatatggagaggtggttatgcaatgaaaggggagacatgggaaacacaccagaagacataacattggaaaaacatttggcaaacataaagccatcccaaaaagataagttgcaacactgccagttgggcaagatgattaaatggcagaaatatttatattgtttaggtagaaagaagggaatagtctcagacatggaatagctaaactactgaaagaatttagaccatttggggtccttctgacccccgtgaaattggaaaccatgtaaattagattattaattataaataaaaatgctctggttataccacactttctgaggaaatcataagtcctgttaccctagtgtttggggactcctcttggctaaaatcactcccttggccccatcaccagctgcagtgattcaggggagtcccacctggttgttcctcttagagctgaaagtgctgaggaaggcaaggaattcttgaatcctagagagtccctattttctagaaaatggtagctgagaaaagaaaagtggccatctaatctggcactagaactgggaatttaaccaaagggtcatcttactctgtcattaagaaatgggtgtgaagacacattaaaaaaagaaaactacacaccaaaatctctgatgaatattgatgcaaaaatcctcaacaaaacactagttaactgtattcaacaacacattaaaaagatcactcatcatgacgaagtgggatttatccctggcatgcaaggatggttcaacatacgcaaatcaatcaatgtgatacatcatatcaacagaatgagggacaaaaccatataatcatgtcaattgaggctgagaaaaaatttgataaaattcaacattccttcatgataaaaacccttaaaaactgagtatagaagaaatatacctagacataataaaagccatatataataaaaccacagctagtatcatactgaatgaagaaaaactgaaagcctttcctctaagatccggaacaagacaaggatgcccactttcaccaattttattctacatagtactggaagtcctagctacagccgtcagacaagagaaagaagtaaagggcatccaaattggtaaggaagaagtcaaattgtccttgtttgcagatgatatggtattacattgggaaaaatctacaggctccaccaaaaagttattagaattgataaacaaatgcagtaaaggttcaggatacaaaatcaatatacaagaatgagtagcatttctacatggcaacagtgaataatctaaaaaagaaatcaagaaagtaatcccaattacaatagccacatataaaattaaattacctaggaaataaagaagtgaaaatctctataatgaaaactataaaacattgatgaaagaaattgaactggacaccacaaaatggaaatgtattccatgttcatggattggaagaatcaatgttgttaaaatgtcgatactacccaaagcaatctacagattcaatgtattccctatcaaaataccaatgacattcttcacagaaataaaaaaaaattctaaaatgtatgtggaaccagaagaaacccagaaaagccaaagctatcctaggcaaaagaacaaaactggaggaatcacattacttgacttcaaattataacacagagctacagtaacaaaaacaacagggtactggcataaaaatagacacatagatcaatggaacagaatagagagcccagaagcaaatccatacacctgcatgaactcgttttcaacaaagttgctgataacatacactggggaaaagacagtctcttcaatacatgattctgggaaaactggatatccatatgcagaagaatgaaactggactcctatctctcaccatatacaaacatcaaatcaaaatgtattaaagacttaaacctaagacctcaagctataaaactaccacaggaaaacactgaggaaaatctccagaacattggtctgtgcaaaaatttcttgagtaataccctacaagcatgggcaaccaaaacaaaaatggacaaatgggatcatatcaagttaaaaagcttttgcacaatgaaggaaacaatcaacaaagtgaagagacaacccacagaataggagaaaatatgtgaaaactacccatctgacaagggattaaaaaccagaatatgtaaggagctcaaacaattctataggaaaacaaatctaataatccgatcaaaaaataggcaaaagatttgaatagacatttctcaaaaggagatatacaaatgtccaacaggcatatgaaaagatgctcaacatcattgatcatcaaataaatgcatatcacaactataatgagatatcatttcaccccatttaaaatagcttatatccaaaagacaggcaataacaaataaaatagcttatatccaaaaagacaggcgaggatgtgaagaaaagggagcccttgtatgctgttggtgagaatgcaaattagtacaaccactatggagaacagtttggaggttccttaaaaaactaaaaattgggctaccatatgatccagcaatcccactgctgggtatatatccaaaagaaaggaaatcagtatactgaagtgatacctgaagtgatcaatgtttattacagcactgttcacaatagccaaaatttggaaacaacctaaatgtctatcaacagatgaatggatatagaaaatgtggtatacgtacacaatggaatactattcagccataaaaagaatgagatcggccaagcgtggcaactcacgcctgtaatctcagcactttgggaggccaaggcgggtggatcacaaagtcaagagatcgaggccatcctggctaacacggtgaaacgctgtctccactaaaaatataaaaaattagccaggcgtggtggcgggcgcctgtagtcccagctactggggaggctgaggcaggagaatgctgtgaacccaggaggcggagcttgcagtcagccgagatgtgccactgcactccagcctgggtgacagagcgagactctgtctcaaaaaaaaaaaaaaaaaaaagaacgagaatttttccatggatggaaaaattccgtccatgtttgcaacaacatggaaggaattgcaggtcattatgctaagtgaaataagccaggcacagaaagataaacatcgcatgttctcacttatttttgggatcttaacatcaaaacaattgatctcatggagatagagagtaggatgcttaccagagactggggagggtagtgggaggctggggggagatggggatggttaataggtacaaaaaataattagaaagaatgaataagaactagtattttatagcacaacagggtgactatagtcaataataattgaattgtaccttttaaaacaactaaaagagcattgctggattgttgtaacataaaggataaatgcttgagaggatggatacctcattctctatgatgtgattattatgcattgcatgcctgtgtcaaaacatctcatgtgcctcataaatacatatacccactatgtacccacgaaaattaaaaataaaagatggaaagccttggggagggggagaagaatgggtgtgaccattggagtggtgatggctctgtgcagtgtaatcaccagactttgtcagtgtcagtcccacaagtgactcggggcaggtagcagggctgagcccccatagtggggttctggggacttggtcctccacggaagtcctgaaaacttggtgctccagggagatcatctaatccagtccacttggccttagacaaggtggtctatggaacagctctggtggagcagaaagaacccctctgagtatgtcaggtgagtatgatgaaggctcagactcgaaggagcagggatctcacagttttctacagctgtttccctttgggaggctgataaaagctttgagcccttggctttagcccccatatgtgaataaacatgagtgtacccaggacatttcaggtgttcaccgaggccagatgtacgtccctgcgcatgacacggcaggcagtgacgcgactgcaacaagcgctaagagtgcatcttctgaagcagacagtagaggggcagggtgtcttggtgaatacaggctctgctccctgaacacccatttttagtttcctcatttgaggtggccacaggaaagggtgttggccatgctggcctctgaagggaaccaagctctgatgcaggggccgagaccagagcagtgtcagcggcatccctgttctggaaggtctcagaggagtacccaggactggggagtccaatgcctgccgccttttctggagcactttattgacctttggctgtgtgccacgctctgtggtaggtgctgcagggaccaagcataggtaagggttctgtgtttttggaggaccggtttacattcctgatgttcaactcaaaaatccctagtagggcatctgggagaagctattgcaagggcttggggttgcttctatgctctagatattgcctgcagataaaataaatcatttctcagttcatgtctgtgttgcagttattacacgtgagtacatgctgctgtgataacagatcacacatttacaaacgaactgacttttactttttgtcattatgtattttctctcctcctcgcccaatcttttgtgtaagtctgtgacctgtctgaggttataacatcatcctgatgctggaaaaggttgggcattggcctagatttttgctgggctgggtcagggcgattggcggagggggcacctctgtggctatagcagtgaaacctgcttacggtggatttcttggcagagaaggaacatagagacgtgccgcctctgctgagtgtggatggtggggatgcatgcaggtttggggttagatgtgattgtgcagttggtcctagccctacttgagggtagctggtgggccttcccatcctgcttctcttaggccggtccatagagaagcaagccccccgtcccctatccagcctaactcagacaactgccctgaatccaagagataatgctctgaccctggccacatttgctcctacaagctgtcccctttctgggagtttctcttgccatgtttttggatccttgatgattgtttcagagcctgaatgcatgagttcaaattccagtcccctcccattgtagctggatagctgtgggcaagttattttacttctctgtgtctctgttttctcatctgaaggtctattagcaccaacctcacggaactgttgtcaaggttaaacctggtaatacacacaaagctcttagaacaaaaatggctcttagaatcacggcgaggtgctacagcatggaggttaggtaactgggtttgcagccaggtggcctgggtttgaatcctgattgttctttcctagctgggtgctcttgaacaagtttcttaacctctctgtgctcctcctgcacagcacaaggagaataacagtattcatcatagaggattattgcaaagaattaatgaaaatggttagaaaggcccctgatgcatactaagtgctatgcaaatactgacatattaattttgttttacaaatgaggaaacagagaggttaagaaactttcctgaagtcacacagaagtcacaaagctaatgaatggtagtgttgagactgtgaggaggttagatccctgaataaaaggggagacatttccccatttctccaaagtattttccttgctctgagagacagagggggtattctcaggttcaccttagcctgtgcatgaccctttgcaagtcagctgacaacagcaccctcatcctggttcagaaataaccgcgtggcattgctgttgttgccgttgttttggtctgatatgatttgctgatgcacactgacagttactctgggaggtgattccactgtctccctggctcacttgggagggttctggctttttagctttgcctcaggtctgacccacacaggtacaacagagtgggtacaacagaactctttttgtatcattataattgtctgaatatcattaacagttttccaaattatttggtgtcattcgcactagacaaactggatattggccttgggtagttattgcttttcagaagccccatctgcctcgtacccagaatgcacatgaagatggcattctcttcattctcagcaaaccacaattcaaacactacagatgcttaaaaatactttctctgcccccaaacattccccagtcttgtccttatttcccaaaccctaggaacccctttcatgtgtcttacatttcttgctatatatagccaattggcttaaaagtgcgtgtgtgtgtgtgcgtgcgtgtgtgtgtgtgtgtgtgtgtgtgtgtgtgtgtactctgaatgctggggcagtttccttccttcctaaagggaataccagcaaagctgcaaaacatctccatggaaaccaacctctcaatccatcaagcttctgcagcgtctaatacattatctaaaaggcgggcagggactaatgaggcaacttaatagaactcacaacatgacattttataacacaatgcccattcctaatcagctagcggcacccgaatgatgaaggaatcccatgttttacccgactcaggctttgacggcctgcaactttggtggatttaccacatcccctcctcccatgtcactaaatgtaggtctctatagtaacctacgatgcaatttaaaatgataatttctccataacgataagactcgtctcccccaacccaactgcctttcaggtttcttatgttgtcataatgcgttttatcttgttacaatgatacttttcgattcactgagaaaacagaagtgacttcaggagaaatattcctaatgtttttggttgatttttcacctttccctcatcctcttctaccttttctttgtcagaggatggatattaaggttctaaacaatatacattcaacctgtttgcatttctgacaggaagcaaaacaggtgtagatcttgctgtaagagaaataagtggttggatattagacttccaaggtttttcaggaagtcagaaatattaacagacaggataaagcaggtatggggtgagctaaaaaaatcaagccacaagtattttccacaggtatattacttcacccctagaactctttttgtatcattataattgtctggatatcgtaatagttttccaaattatttggtctcattcacactagacaagctggatattggccttgggtagttattactttactttttgtttacagtttcttctgttgttcagaatccttctggcaacagatagtgaatgattccaaatctctttcaacttgatgaactgttttgcctgaaatgctctgggaaaaaaaaaaatgtaggatcagatcatgtgagacagaaattgtgctaagttgtttgtcattttagaattgagatcagagtgtcagtgcctgaaaaactgaggtcgttctgtttgcctcttagactttttaactcctggtatttaaaaaccatcataaattattagtagaatgattatagcaagggaatacaatttgagaatgcttggagattgaaattccatctgacaaatctgaaaggacattatgtatttaaggaaaaaaaaaacttcccagaaccttatatcctcttcaacaatgtactacatgtcactgcccagtcatgtgacaggtacagctataaccaggcagaagtaacctttgtttttcagattatagattagcctccttctttacctacattgttttgtaaaatgttgtaaatgactgaagggtgccaggtaagacctctttgctcttactgtttattttcattatagattaactcctctcttacttctgtcatgcaaagacttcatggctatcacattgtctaagatggaatgttaaatacacttttttttttttgagatggagtttcactccttggaatgcaatggcacaattttgggtcattgcaacctctgccccctgtgttcaaactgattctcctgcctcagcctcctgagtagatgggattacaggcgctcatcaccacacctggctaattttttttgtatttttggtagagtcggggtttcaccatgttggtcaggctggtctcgaactcctgagctcaggtgatccacccgcctcagcctcccaaagtgctgggattacagatgtgaaccactgtgcctggcccactcttttaaattggaaaggaactaaaaagctgtatggaaaagaaaacaaactgcaactaattacacggttgtaactcacagaaaatgtaatctgattacatttctttgttttcttcctatataagcaagatcttaacttttaactttgaagcgctgacccatttatgtggagtctcttttccggatggctactcccagctttttgcttgaataaactctttaaaactgtattctgattctttttaattgtttcggattgatctgttgaagtacatgttcctgctcaaagctgggtgtgctgcaattcaattctgacactaaccacctggagttagacttcacagattagggactctgtcctggaagccacagatttactatggatttgctgtgtgtctgccattttgcactgcatttggatgacactgcttcagatgtcagcagcacatcggggatcctaggctatcctcacttctgacctatgttctgatcaaacttcctgctacgaattctggggttcgtatgacccattcaggttccataatttactagaatgactaacagaactcaagaaagtgccatgtcaatgttattaaccttgttcttactcctcatcactttggcaaacccaaatattcagataatttgtttctttttgaaagcttattattattttatttgcttttctgaagagcttaggatataagaacttaggagatacactgaccaaaaaccatgaggtatatgttggcagcccttgagggatgtgccttgttttgactagttggattttcttgtgaacaatgtcttaagtagaaaataaccctctgtgttcaatattatttcttgttgaaaaacttaaaaacgttttagctggctttcctgtcttaagagagtgtgacagatactaatcttctatttaaaatgtttcagctggtttttctatcttaggagagtgtgacagatacttatctcccattaatgatgctcattcttgccatgtctcctcttgcaaatattatcacaaccactgttgcatggttttgtgaaggtgtgactaaatttgttctgaccccagtataatagcacataatatggaaaataacttttttatttaggtgaatttcacataacaaaaaattgacaattttaacttaaagtaaacgttacctacattgttgcacaatgctgtataaccactacctccatctagttcccattttcaacaacccaaaaggaaatcctgtactcacttagcaattctctccttcagaaggcaatttttttatttcttaattttttaaaatttaattttacattctaggttatccatgaaggacatgcaggtttgttatataggtaagcgtgtcatggtggtttgctgcacctatcaacccatcacctaggtattaagccccacatgcattagctatttatcctgatgctctcctttcccctgcccccccaacaggccccaatgtgtgttgtttccctccctgtgtccatgtgttccagaaggtaattatttttaaatgaaatctttgttatcagtcgtccacttaacacctacttatgccaactgtgttagggtactttatttctttatcactttctcatttttcctaaatgtattgtatatggttataggaagactttagtctactgggtctggttaatcaaatagtaaattctactctataaatagaatctatatcctttattttatccagaaagaatggcagacacacagcaaatcctagtaaatgctgaatgacagttttcctgtaatggttttggattagaattatattgtctaatggttgtattattttaaagatttctttagcaggcattagtcatgaccagccagagacatgactgcatatctgagtcaatgtgaagattccaccagaggaggataatcaacacagaggagctgtcacacctgtttgttaaaataagtatttctcacactgcttcaggtgagccaggttgaactgaactgcaacctgaagctactattctcaggtgagctagcttcccagagttgctgtttggagagacagatgtaataacaatctggctgcacgtggaggatgacaggtcccttgtcatgctaggagctggggagtggcttgcagacaccatttcacaatgaagagtgggtcgtggtttgataggcacctgttgtctatggccataccactctgaacatgcccaatctcctctgataggcacccattcctcgtggatggggaaggtgggggtgctgccagggctgtgcccaagtgcctggttccattttttcccccaacaccagacagcagccaatatcccaggacagctctggggctcctacaagctgggagctgttcctgaaaacccactcagctctctgctcctgaagcctctgaatgggtacgggctattgttttatgcgggaaattatctgtcaaaagaaacgccttctgtgttcctactcagcattgagaggcatatttttgttgagaggatgctttatattggggtctatggctttgttggagcctgctcacatagacaagtgagtgggaacttctcatagacctctaatctctatggattcgattttgattgtcttttgtgaggatgtaaaacccactattggtctcaggttcactgaggaaaagaacctatggctctgtcaagaagccatagacttaaatcacttttaataaatatttagattgggtcttatatgacagctcagaatgtttcagtggaattgacaccaaaacgggggactcgagagtgatgtcagcagggggtggaataagacttttcagtcctcattccttcatcgaaacatcactttgaacaacttgtcatgcatgaaaattccttcacaagagctaaggaaaccaggcaagagactatagcaccaggggttagcacagaaataagaaaggacatgttgaagagggagggacagattcacataacctgtgtcaccctcccctaaacccgagcagcacagcatggagagagatggcaggcaggcccccagccccagtctgcaggccagcacctgccgaaccagcccccacggccaccccaacaccaggccagagccctcagacttaggctctgggcacacctgaggctccagaaaaatgctgcaataaacataggatttggaaaagaaggaaattctgtcacttgcaacaacatggatgaacctggagcacattatgtgaagtgaaataaaccaggtacagaaggacaaatactgcatgatctcacttacatgtggaatctaaagagtccaacccatatgacatggtttggctttgtgtccccacccaaatctcatctcaaattataatctccataatccccacatgtcaagggagggacctggtgggaggtgattggatcatggaggctccttcccccatgctgttcttctgatagttagtgagttatcatgagatctgatggttttataagtgtttgacatttcctcctacacactctcactctttctctcctgccgccatgtgaagaaggtgcctggttcccctttcgccatgattgtaagtttcttggggcctccccagccatgtggaactgtgagtcaattaaacctctttcctttataaattatccagtctcaggtagttcttcatagcagtgtaaaaatggactaatacaccatagaagcagagagtaggtagaatggtggttcccagaggctaagggatggggagatgttggtcaaagaacacaaagtttcagtcagacagcagaagttctggatgcttaccatacggtatggtgactgtggttaattattatgcattgtatacttgaaattgctagatcttaaatattatcaccacaaaaatgatgtttgtgagagggatatgctaactagcttgattgaatcatttcacaatgcgtacatatattcaaatatcacattgtaaatatatacaattttattcatccatgatatctccatggaggtggggggaaaaagagacaaatgcatttttaaaaagggaaagttcttgacacaaaaaatgcatatttttgttctggttaatgtagagagtcagcctgtgtcaggacaattcaaaattcaaatttgagaaatcaccagaattcctataggccaagtcctttctcttaatgtcatatttaacaccttcataatttttatgatatgactgttagacaaacacaattctgaagtaaaactgtcattcagcagttttacttcaacctctctcctcgtgttcaactcctgtcagaaatgaccaaaaactggatggcttaaaacgatataaatttattctgttctgtagatgaaaagtctgaactccaggtgtagggggtggggggcaagttctctcccaggcatctaggggagtgatatggtttggctctgtgtccccactccaatctcatctggaattgtaatccccacatgtggagggagggacctggtgggaggtaatttgatcatgggggcattttcccccaagctgttcttgtgatagtgagctctcatgagatctgatggttttataagtgacgggctttcctgcgcacactttctttcctgccaccatgtaagacgtgcttgcttctcctttgccttctgccataattgtaagtttcctgagggaggtcgcctagccatgcttcctgttaagcctgtgagtcaattaaacctcttttctttataaattacccagtttcaggtagtatctttatagcagtgtgagaacggggaggatcctttctaaggattctccctaatacagggagggtcctttctggcttcttccagatcctggtggctgctgaccgtccttggctttcgtgggtttactccccagttttcaaggccggcatctgtaagtctctgttctgtctgcatgccaactccttccctgtgtgtggtcaaatctctctctgcttccctcttacaaggatacatgtgattgcatttagggtccacctggatgatgtggggtattctctccaagtcaagatccttacttccatttgctgagatttttggccatataaagtttggccatttaaaggttccaggaattaggatctggatcgtcgaggccaatttttaaatctactacagtagttaagcagatttctataccgtaggacattttgaaacatttattacactaaatataattcactgagaatctcaagaggagggctaagaacttcctaaaattgttgaatcttcaacacccttcttcaagcctgctttaaaaaaatttatcctgaggctaccatgagactaaagcctctaggagtacttcagaaaatgttatcctatggataactgggcaacatttcatatatacaaactccttgtctagcactcaatacctcactcgatccaaccccatctgtcattcctagactttctcttactattttcttacttaaagtgttcacctttagtatgttctgatcactgttctccaaacacatactgtgctttcctgcctctattttttctcctaagtgaatgaccactgtattcgtccgtttccacactgctaataacaacatacccaagactgggtaatttatatagaaaaagaggtttaatggactcacagttccatgtggctggggaggcctcataatcatggcagaaggtgagggaagaacaaaggcgtgtcctacattgaggcagggagaatgagaaccaagcaaaaggggaaacccttgataaaatcatcagatcttgtaagacttattcactaccacgagcacagtatggggcaaactgcccccatgattcaattacctccctctgggtccctcccatgatgcgtgggaattttgggagctacaattcaagatgagatttgggaggggacacagccaagccatatcagccacctatccccttccccactgcacccctaacttgcagcactgtgacccctttctctcttattaagtctgggcattctccaaggcccagctttctctaagtcttccttaatcccccaagaaaggatctccccttttctaaattttagctttagtgttgaggtaccctggggtcaataataatccagtatagaaatgtgcgaatagttactttttttgttttacaagcaccttcaaagtcatcccttgattgattgtgttgtctttgcaatatggaaactggagctaaaacaggaagttaaaattacagcataatgttggggttcctccaggaagtggggcatttcaggttgaacttcatttgataccgtgtcttagtttaaaaaagtgaaaaagtggagtctgcaggtgtgcctctctcacttggaatctcatcatctatttccttatgataattaagtcttgttcaaagtagtgtttaactttttatgtcagactcacaggtatggctcctgttttgtaacttacctcttcccccctccctcatggtacctactgataaatacttagtgactacttggttatttccaatttattaaaaaaaaaaacagatttttaaaaagagaatgcaaggaagaatcgtgtaaaataattctgatgaatgcaactctcgatttactcaaagaaagatttctttcttccttgatggccttagagtaacatttccaaatctgacaagagaaaataatgagaaaacctccatgggagagattagagatgggtctgaaacctttcctcttattaaagccaaggaaacagggtggggaacacacacaagcagagagtagcctggatttctttcttaaatccagactcgttttgtccttttcacgtcttactgagagtgttcttgttaagaatgcgtggtggaagaagggaccgcaaaggcttgtccctgggatgtggggactcagcgactctcaggagaaaataattttgggaaggagattattgaagagtcagggcacagtggcctctgggtttaattggacacttctgagtatgagagctataacctgaattaaataaatctccactaagaaaaatatccctagcaactaagcagggaatgatatttggtttgggtttgacttcaggaaatcaaaagtgtgctttatctccctgaattctgtgagctggactgtgtgagtccaggaagcaatcaccctctatatccccatctgtccaaggggagtgtgtggtaccaggagggaagcacttgcatatttggcaggaaagatcactagtatttagcaatgaaacccacaggtatactctggcaacaatgagatttcaggtgtaaggtgcagtgttacttgtcagaataaacgtactgcaggtaacaaacaccacatatccaaatcccgtaagtagtagaaatcgatcaacaagaattttttagtacctaatggaaatttataaaatcatagagtgacatcataacccttgggttttttttttaacctcgagtctttaaaagggttgaatacagtacaaggtgataaaactcaacaatatgaatattattataatgggcttgagttgagaatagtaagtaaaacaaggtatggaagataatgatactttgtcattttcacctttgtttgagtgcctgatatgggacagttgctatgttacatgttttatatgcattatatattagttttcaatatatgaatatattatctctctctcagctttcagtgtatctgttagtttatatacacagggaacataatcaaatgcagttatacatatttatatatgtataaatatacatattagcacacatgtgcacatacccattagctttgtgtatattatgaaacccaggtggggagctggtatgatcagtggcagaaactcggaccagaggggttaagtgagttgcctgtagcctcacagctaggaggtggctgggccacagttagatcagctctgtctgtctcttaaggccacactgacgtgcctcacctgataagcactacaccctctgtggacggcagggatgttgtgctaattgtggagaagcctttatgaatgcaattctgggctgcagagaaattctgagtcaatatttaaacatgtagatatccccaacccccaacacctttgagcctgaaatgtcatatcttgtgataaaggtgacatggaatcaggaaagcacaccggggtgtaggtggtgatgtttttactgctgaacatcccggacgccttgactttttcctctctgggaagccatcgaggaggtggctttctcccactggtgccatccaccttcatctgagtttaattccccgcagcactggaagccagggtgcttccccggcctgcttcccttccccagctgaattcagggagcctgtgggctgtcccagctcacacacctgtcaccagggagaaggcaggcctgggagctggggggtgatggattcttgatgaaaagtccctgaagagatcagtttcctttcggtgacaaagtaacatgaggcaaagcgggctgcatgaggtgaaaagcaaattcctccaagcaggtgtttgcatcagtcccggtccgggagaggcccatggctctgcgtggcaggctgtcctccccaccctcgtagctgcgctctgcggagtttcagcctttaaaattcagtgttctgctgctccctctgaccatctgctcactcaatttccagagctgaggctgaggctcagcgcttcctaaacatgctgccttctcccagctgtggactgtccacgcttccctgatgagttagccatctactctgtaccctccaggctgtctaccctgcaccctccagcttttctcttggccacacatctgggcatctcttccaaatggccatttgtttgcaggtcccatttgtttgcatggccatttgtttgctctctgagggtgcagggaaaggctggcaccccaaaatccagccatgcagcctaacccagggcctgtgccatcctgggggagacttcctctcctattgccctctgccttgcctgggtagaacctgctgttaccagaggttgatgggaggatgagcagaagtgggagtggcgggaggtgggggatggagcctgaaccaggggtggaggtggtgggagggaggagcgggctcttggagccaggtggcagattgtgggaggagggcgggagggacagtgagacacagtgagatggggtggcagttggtgggaggcggggaaggcgagcggaggaagtgtgaggcaagagagtttaaaaatgtgtttatttacttttctactttgggctggagcaaaggcaagtgggggtaggtgcctttcatgttccctctgggagctgggggcctccagctttggagaggtgcttctgcacttgggtttggttggggctcctggatgtcacctgggcaccccactggcttggaaggggctgggaacacatcctgctgctgggtgtgtgggggccagggggcagtgatggagacagaggcagaggtgtgtggagcttgtggccccagtgatgatggtggccgcctggctcaggcctctgtgtctgagttgccaagctgggctggtaatgcagtgactcatgttgtgaacagctgctttgcccatgattactttctgtaagaggagtggcaaatgaggaaggccaaagtccctgtgaacccatgcgagagaggaagacactggagtgaaatgctccatggaggctttgcccacgcaggggtgcccccgagatgggggcaaatggaaccaagtgaaaaggtccatagctgccccagagccgggctttccattaccaataacttggaaaggcaaaatgagtgagaaaaattattattgaggaagtcatcgggcaggccctaaaacctgctgttgtggaaagaatgacactctcgttccatgttctgggagaaaatggccagctctgctcagaatcagggtccccgcctcctccacctgcccactttcctgctctcctgtgtctgtcagtccccaaggcagtggtatttccaactccccgacaacaccatcacgatggaaaaatcagtgcatctttctgagcctcaatcagatcatcaattaaatacagattcttatgtctgaattgtctccacagtcaggtggctgaccagacagactctcctggtggcttcctggagtggttcaggttgatcatcccagtgttaggcaagtggaaggtgggaggccgtagcctggagaccacaggcctagggagggtctgagactgactagcaaatcctgccattactgcagaagaataaatgcctgggtctgtttggccttcctcttccttcctggtttcatctacagcattgattttcaactactcccctgggggtgactttgctcccccagggaaaatttagacatgtctgaagtcaccttgttgtcatacctagagggagggtgctactggcttccggtgggttgaggtcaagttgatcatcctacaattcacatcaagaattacacagctgacaaatctcactggtggccacgctgagaaagcccagttcattccttcccagtgccagagagaaggtgtgggcatcagagaggtgagtttcttaccaaccaagtaagggacattcatcagaaggtgaggggcaacgtgatctccaagacagcagaaagaaaggagatgaatttttaggtaacagttttagccccatttccatttgcacaaagaccagtaataacttacaggaatgtcacgcgtgatggttctaaaattttgctgttttgcaaacccctgcatgtttgtaccagttaaatgctttaagccacatgctcattctggatatggcaagggagggaattgcattcttatttggaaatggccgttagggggaagatcctgggcagtgagtgcaggaggcagcaaataaaaactacaggatcaagaaagtcccaccctgagggacatgggagggagaagaagggagagcaggcaaggcgggaagccccccttgcatggagacatggctcaggccttctagtccatttcagccctgtcagcctcagaggtaggtaggatctctgattccaactgaacatgcctgtaatctcaaccaggaagcaattatccttgagtttaaaagatattttccagtaaggacaaacgtatctcacagtgaaaaaataccagcttttcagaggagcacagacagggaagagcctactagcttgcttttgctttcaatcaaaggctgcttttctgcctaatggtgggactgaaatgatacattgtacagggactgcactaatgtgatgaagaagcataaacgaagtttctgctgctgctcccagccagcccttcttagtatccactgagtgcctcactcccctggtcctgcaggtaacccagcaatgaataacaaaagagaggctgaatccctcagttacaagttgagatgacaggaggcaatttggcaagcatgagcagacaggggtggtgaaggaaagctcttggagccataggagagcatgaaaacccgcctctaggttggccttcaggacctgttcccagaagtacatggcagaagctcttggtaagggaatgactgcttctgttagtacctgtgctggcaactcaaaacctgcacctgcctccagtcctgtagctcacctagctcagctcaccctgcaggaggggcacacggtcctggggcaaaggaggcaggggaatgcgcaaggaggggaagtggagaattgtcagaaggcggtcttgcggggagagactgggcagccttagtgatacctgcccactatggaagaggaaggcaaatgagaagggaggttttggagagaagaaaggcagtagagggaagtaagtaccattctgcagggacagtagaaggcacactgatggacagctgagggggatggagtccctgtgggactttaagaagaccccaaacctcctttataaaggaagtatgcctctggtagggacatagcaatgttttcctgggtggttgtcactgcagagctcattagacaataatcagaaataaaacatcacagccatgtcttaaaatatgtaatggcaggaactgagttgtcaagagtaatgagtttaagtcaagttacttttgagatgatgctataactacctgtgtgagtgtgaacctgagataaggatcttagtatttaaagtgcctaaatttcattggtagggagaaagtgcattttaaaaagcaccatctagtgggcctggagtagcttttgtcccgggggataaagggtcatttagcaccttaaagaccatatacgatgaacagctctgccccgcgtgaggtgacacaacgtcttcctcggcccttaactcccagcccagctacaggatctacagaaatctacaggattctcccattgtcaggaaccctgggacctccggatgaatgggctcccatctagaattctgacacctgctttcctggctctttgtcttggttgctgggacccaggctttgtctttgtaggcaggtggttctggaggcatggggcagtcatctgctctctgacggtcaactcaggttttccccgtgcccatcctggtctgtctgtcctcaggtccctgcctcacccttaacctgctcagctctgtatctggtggggggcggggaagctctgtcagctgacatccagataggcttagccagtgggggctccactgggagcctggaggtcggtgggaagagagaacaaaggtatttctctccctcttcttggcctatagaggcgtctctggcagtgaccatacctcctgcatggctcaagctttcatcagacaggtaggctgtcgttccaattctgtcgcccctttccatccctatgacctagaggtagtggtggtccccagccattgctgagagtagattatctccctgtcccccagtctggcttctcggcatttcttttcttttctttttttttgagatggagtttcactcttgttgcccaggctggagtgcaatggcgcaatcttggctaactgcaacctccacctcccgggttcaagcagttctcctgcctcagcctccagaatagctgggattacaggcatgtgccaacatgcccagctaatttttgtatttttagtggagacggggtttcaccatgttggccaggctggtctcgaactcctgacctcaggtgacccacccacctcagcctcccaaagtgctgggattacaggcatgagccactgcacccggctgacttctcggaatttctagcatgcagttcagcccctctgtcttctggtgaccatacatcctccttccaaacacagagtggaattgtgcccccttcatcttggaagttaggcgaggttattgacttgctttggctaatgcaatcagagcagaagtgacatgtgtcatgtgtcacttctggatggaattttaagatgcagtgtcaatataccatgtgctcttccccaccatggccatggatgtgaaaacgcaggtggagatgcagcctccgagactgtgggggtcccagggtgaccctaacatgtccagttcatggctgaccagtgtggacaagtggcataaaggagaaataaacgtgtgtgcatatgcatgtacattcagccacagagatgtttttgttattgcaacataacttagcctcatgccactgatatacacacacctgccctatttgtatcctagagagtagggagttctttcccaaaaggcacactgactgtggaccaaaaataactccaaacaactgaagcctgtgcctaacaatggaaaaccctaaactcaatatatttgcatttgaaccaattgtaacagcttatcaaatgactccttctaccacctgcatttctagccctggggtgtctcgaaagcttcgccaagcctctctcctaagctcaaagtcctttcttgtcctccactacatcccactggtcaccacctcttaaattcatttcagatccactcttgtctaggtccccagagcctctcagctcatgtggtgtgccagctcctggattctttcatccgtgtatgcccaacctgcaatccacgccatgatgcctcagtggattccttctaaaatgctgatcttctttgaaaccttcagcactgccccattacccacaggaaaaattcaagccacatacaggcccttttataatctgacctctcctatctgcccagtcatctgctatcaatgctttgctcttccgccacctctgtcttcctgcatgacgttctagcacttacagtcccattggctgcctggtggaaccctgatcatcctttgggtgcctttttgatgcaggagcacactggggtctgtaaaaggaaagcctcgtggcctgcacctgcaagctacagcgacttacaggatgcttctgcaagaacgcatgccacatgtcatagctgttactctcttgcctcctttgcccccaaatgttgcgcctggtgcaggcaggaaccccatctttttgtctttctgtgccttaacacaatgccagagctataataaccaccccataaaaaagggaataaatgattaaaaaccactctgctttaattgagctaatttaatgtgtggtgattgtaattggttctctgtcttcatttcatctgacacaacagcatttcaaatctgtactaaatttgagctgtttctttagtcataggaggaattccctctatatcaaagcagacagccaagacctctgaacccctcacagagcaggtccttgactctttgcagaaaaagaaaccatagtctttttgcctgtttctggctggatgaagattcagcccctggagctactcagaataaagctgctgctctgttatttatttggaaatgatgagtacctcttctctgctccatgtggatgtgttatggtggtgatttcaaggtggaccatgcccaaagggatggctggggtagaatggctcatgacaacaacccctagggacgctctggctgccaaggaaaagtggggagtgggcatgcctgagagagactggcaggatagagacagaaagcaagaggaagccaactccttctgccaagatgcagagacagccacaggtagctcaggcggcccccacttactgatgcagtaatgcatggcagacacacaactgatgcagagaaggggacagaagtgtgatttcagcttgccagcagaaccctgaggttggaggtggggggtcctagggaagggatcctgcagccaggagaagacatcagggccaagtccactgcctgttcaactcttgcaactccaacaccatgcacaagaccagatatctgattacaatttaaatatcaatgaaaccatgtggcaagacttcctgcgctgtatttgatgcattcccaggacctccaaggttggagggcagtgatgtgtcagcagacaatgaccatgaagaaaattacctttggaaatttatgtaagaacagcctgcaaagtattccatgcagaccatgattcagagctttcgggctatttgcctgcctctggacatctccaatttgtcatcatctgagaggccaggacagagtctactaggctgtgtcacctctgatgatggcacggtttgggtcactgcatgcctgtctttagacaatattgggagcctccactagaatcaggctttcagtttcatttcagtcagtgggtgtagtggtaaagtgctggttaccagcgagcaagctgagagtcaccctaaccctaaccctaaccctaaccctaaccctccagtgtgggctttctggttgcctcatttggaatgggcttctggtagtctaagtatgaaaatatccactgtgaagatgcaaatagagattaacatttcaaagggtagtgttaaaaaattggcagcccactttttgatgcgatctatccatctgacaaagggctaatatccagaatctacaaataacttaaacaaaatttacacgaaaaaaacaaacaaccccatcaaaaagtgggtgaaggatatgaacaggcacttgtcaaaagaagacatttatgcagccaacaaacatatgaaaaaatgctcatcatcactggtcattagagaaatgcaaatcaaaaccacaatgagataccatctcaagccagttagaatggtgatcattaaaaagtcaggaaacaacagatgctagagaggatgtggagaagtaggaacattttacactgttggtgggagtgtaaattagttcagccatagtggaatacagtgtggcgattcctcaaggatctagaaccagaaataccatttgacccagcaatcccattactgggtatatacccaaaggattataaatcattctactataaagccacatgcacacacgtgtttattgtggcactgttcacaatagcaaagacttggaaccaacccaaatgcccatcaatgatagactggataaagaaaatgtggcacatatacaccatggaataccatgcagccataaaaaaggatgagttcacgtcctttgcagggacatggatgaagctggaaactatcattctcagcaaactaacacgagaacgggaaaccaaacactgcatgttctcactcataggtggaagttgaacaatgagaacacatgggcacagggaggggaacataacataccagggcctgtcaggggttggggggccagaggagggataacattaggagaaatacctaatgtagatgatgggttgatgggtgcagcaaaccaccatggcatgtgtatacctctgtaacaaatctgcccgttctgcacatgtatcccagaacttaaagtattatatataaaaaaagatttaaaaaaattggcagcctttggaaggttgaaagttcacaggctgtgaactgccacacttagtttgctaatttttagaccccatggaccctctctttgttaaatctctccctacctcctctccctctttgcctacctgtcttgtctttgctccttgtaattctgtctcggtcctcctcaatacccccttctcttgggctttcatcatataccgtacatatattttctctatgctttgtgcgtgtttttgttgtttctctatctcttcttccacatctacttttcttcccttctccattttttttcttatccttatcatgcccgtcctcgtttcaataatgtgacgtaaaatattttaaagtatttttaatgtattaaagttgctgtaatttttttcacagcaaagtcgtcagaaaaataaaggtggttttattcaaacatttaaaatttgctaatgttaatcaaacatttaaaatctatctcttgcttgcccttaaaaaaatgatcgaagttgactttttggaggtggttgatgaatggcacgtagcggaaagaaatgcacctcttccctgctctagaagaagacattcctttcccattatggtatttgcttagccattgatgtggctagccatttgctagcatgtggacacctagggtgatgggagaagaatctctatccagttctagttaaacatagagatgttctagtaaccagatggtttttgcttggcagtttaacaagcaaagtgtttattggctttggaaacccattcatagcattgtgttttgggtattcatggttctgtctgtttttttttttttcttccagagtgtggccatggtttatgttcccatcaattttattgtgtggtaattatatgttaattctttgctcagcctactgatagaatatccttacctaattatgtatttcattgtagatttctatgtaaaataagtgtgtggtatatttaattagtcatgagtttaatttaaatgaaatgtttggtatgttgaccacatgattagcattttgtagcatctatagaagttgcctcacatcttatatattttataatttgctgtatctttgtaaggaccaataaactcggacattgggtacgactctaaggtctgttctcaacttttaaatttccttatgcattgagaaacatttatgcaatctttttcataatgacagagcacattagaagaatgggtgcacccagtcattgacccaaggattcggaattcaactttgatagaattctcttatgacagttgattcacagaccaaaatcattagagatattgttcagccaaacctgaaacctaaaaccaataaatcgatagtcaggtgaagagctcttatttaaatgtatctggaaaccaatatagatggaaaaataaaaatagctttatcagaaatattaatcagtacggtacccttccaattcagtcaggtgagttaaaaataatattcactgaaccagagtatccatttccaacagaaggaagccttgggaaaactgttagcatcataacttatgtgcaacaccatctgatgtaattcacccagacacctgagactccattcatggacaatgatgcttaggttctaagccactgatcctcctgtcatttagagaacgtggcgaatttggacttaaagattagaaagaaatctgctcatgtgctgtggattgtgaattagttgataaggcccacggatccactgcatatttggacaatacaggctggtccattttgtgatggcactggccacattctttcattccaggtctgagaagagcacatttcatcactttaggatgctttcacttacagagaaccagtgatatgatttggctctgtgtccccatgcaaatctcatattgaattgtaacccccaatgttggaggtggggcctggtgagagatgatttgatcacgggggcggatttccccttcagtgctgctctagtgatactgagtaagtgctcgagagatccagttgtttaaaagtgtatggaaccccctccccctacttcctcctgttctggccatgtgacatgcctgctccttttttgcccttcaccatgattgtaagtttcctggggcctccccagaagctgattagatgccagcaccatgcttcctgtacagcctgtggaactgtggagctaatgaaacctcttttctttatcaattacccagtctcgggtaattctttatagcagtgcaagaatggactaatacaaccagtttggggtttttcaaaccaagttgtaaattcttttaacattttcagtttgcaagactacaggtggaaaaaaaggacggagcagagagcagggcaggagatgatacagaaataagagcaggggagaggggtgtcagtgctgaagggatttttttctttacccagtcctttcatcacagtgaaattagcatgtgttcaagacttatgtaaaattacacagaggtttggggtcaggaatgaaaggaaatcaatgtaaataactttttaacgttatattttcttggtatgggtggatattttggaataaagattcacttaccatgctacagaggaagacctgtatttaatagtctcatgattagaggaggaggaaggtgcacagttaaatgtgggcaacattaatggttaatttttgcaggccaaatttaataaggtgttcatggagaagtgttcgtaagcctccattgtaactttccatatgaaatctatcatcaggagaaatttccatttttcaaaggaaaaaaatatgccttgtatttcatattcatatggtctttaataattagatttcatcatagaaaactgcatttctcatttgaagaaggctttattctaataaattccactttccttttttatttttatcttttattttgagaccaggtcttgctctgctgcccagactagagtacacttggctcacttcaacctccacctcccaggttcaagtgattctcctgcctcagcttccgaatagccataatagggattgcaggcatgcaccaccatgctcagcttatttttgcatttttagtagagacagggtttcaccatattagccaagccgatcttgaactcctgacctcaagtgatctgcccgcctcagcctcccaaagtgctgggattacaggcatgagccactgtgcccagccccctttcctcttaaaaatgctttgtgtatcctgtttatttagcttaagagcactataacgctatgttcaaaacctaaatcattacaagctatttatactgcaagcactccattttttaatagttctgtctgaaatttctgaacgacacctgaaaggtttaacaatgatttaccattctttcctctctttagatcatccagcccgtggaatagatgcccagaaaaaacttcagctgactttgactaaacctcctaaaagtcaggttgaaattattgtgagtcccaatccccaatgcagtgttacaaacaaaatctatttttattcttcagctccatactgtgggtaacagcttcagcaaagaatttgacctcaagcaagatgaactccaaataacgcataaagtaacatcaacatgatgcagtgtgtgtgaaacagatctcggtcccgtaagagcaaaagagaaggacaaatcagatcatcacacgggatgtcttttttgtgcgattttgcattttcccattcaaaacaaaaaataaataataaatttgaagctactcactcatggattctgtcagcttggccattgttgcagtttcttctttgtgcttttcctggaggtgagaagaaaagacaattatctgtaaaacatgtcttagatatgaattgatctaattgccatttacagctatatctctcttccttctttttcctaggtcagaatttggtttccaataattaaatgaataaaaaacccacatgacagttatattatcagtcagtcactgaaaagagatttttagggcattaaaaagcttcccattgctcttggaaatgagcatctgtcacactgatcttggatatatataattggtgacgcacgaccagttttcaaaacctctttgacactggatttttgacatccatatgccaatttttttttcctctctgtttccccccattgaagctttcttggtatttttggagttgatatttttgtagtcatttggtttcctctttccaaaaaactaaatagattttatacatatttctttgtcttagttttttgggttcctggagcctttaaaaagtcataggttttgatgggtttataaccttatctactttgggctaaaaacattttgttttaaccgagatataggttataacccactgagtttgaaagccagaataatacatacagaaattgaatctgtcctaattaaaaaatgactttggagctattaagaatactggtcatctctactgaaaagttctctttaacttttccacagttctttgggtttaatttctttgtgttcctaacatatgtagtaactgcaacattgcccactattattatactttttttgtagccttgtttttctgtgaaactaaaatatgttcattatttaaaaacttcagaaaaaacctgaaaattataaatctaatgtcacccccagaggaaatcatggttacattttggtgactgctttctaggcctatttctttacctgtgcatatttacagatatgggaatatgatcctatcttcatagagataaatatgtcatatacacattttgtgttgaagcaactttttcacttaacatcatatcatgtatctttctatgccaataaaggtagaatatgtcatcattttttaatgactgcatagtattcatcatggattatatcatcatttcctttaccagatcccatttaatttacttagaattttttactacttcataaaacactgggatgagcatcttggaacttatatggttgtgcacttgtcctgtgcaagttattttctgaggataaatcctaaggtgaggtatggcttggtcaaaaagtctaaatactaaaaattctgacatatagtgctcaattgtcccccacaaaggttgtacctgacagtgtataaaagtgttcagttccttacattcttgccagcttgccagtggcactagcacttttgactcctaacctttgctaaatcaacaggcagacaacattatcttgttattttacactgttgtctttctctgaccttttgtttacggacaactgtagtgttctttcccatgtcatcgttatgaagtttactcatggtttcacattgttgtgttccagcccctctgccatcgacattttcgtgcttggaagcccagggtggtatttgcttttccccacggccctggtacaatgctgagtacagtctagcagtttggctaacacttgaaatgatgtcatggcttgggtgttgtagtaaggatagaaagatcattattcatcctccttatgacactgttctcaaactggaagggtatgctttgattgaatggcaacaaacaacttcgcacatggcaagtattcttgatttccacagccctgtattcatgacaacgaaatcagcacgctgcctcttacttaaactaataattgcccttgagaacagaaggagctaaggagctgtaatctaccaacctgcttgctgtggaatttcacccgtgatatttagcctaccacttgggttatgtcaacatgcagagaaacagcatggcgtgggccagtagagaggctaagtgtcacgtcacagagctgaataagacaggcagagaggagcctcttaccacaatgccggttcatgtgagtgtgcacagcggctgctcaacagctgaccccagcgggttgtgacaattcaggcctaaaagctgttccatggcagggactcagtgaagttggtcccagagcttgttctgtctctgcgtgtcctgtcagtgactctcagcttcccctcatagcccagctctgctgtgtcagtccgtctagctgtactagctctccttgtgtcctggtctgtgacttgacttccccattttctgggtctgtgctccatcaggcctcactctggatcacagacctcttcagcttgaccctcctctgatggcatcagcagtgagaaccccccaacgccaaaccataggcgtccagattccaggcattacatttctaacaagccctgtttagtgtgtctgttttcttgagtgtgtgtgtcaccactttatctcttgtgacctaaggaccctgccacattctggaccccattcttgctggtgggtggtccttgcagctatttttgttcagatgtgctggatatcttagtcctagagatgtcaaatactgcctggaccagcaatttcctcttccctgtagttaaatggaatcctctgacattaagtggggagaggctcctaaaatcctaaatatagctctcccagactgactcatctatatcataacttatggtggaaatcatgacatatgttttggtgtaagtggtttagttattctattggatgtctctaaactccttatgtccttccctcattatcagaaagttgatgtttgcagttacacgacatgtatatccaataaagcatttacatttcattcttggtcccaagcaaattctccttattttaaagccaagagtttccttcacagcaaatttcctggttgttggatttacattactgggaagagctttagaattacagcatattaaaattggaagtgattctttcagagattgtcaagtccaatgccatagtgatgcagttgatgaaactgaagcccagggaagagtgtgatgtgccaggaaaggatttagagggagctgatctctttcccttatccacaacctctgctctcccagaaatcttaaggcccatcaaacctaagcccatttagccaagatcccttatacagcagtcccagtgcagtgttgaagtttcctagatttgccatttctatgttctttcttcgagtattctcattcacaacaatgtccctaatttccatgaatggctggcaatgcccagatttgcatatcctgcctgacctctccatggaacccctgctgtccacctcttcttccttcctcaccccctgatattttgcatttttttttttttgagatggagtcttgctctgttgccaggctggagtacagtggcatgatctccgctcactacaacctccgcctcccgggttcaagcaattttcctgccttagcctcccaagcagctgggattacaggtgcacaccaaaacgcccagctaatttttgtgttttttagtagagatggggtttcaccacgttggccaggctggtcttgatctgttgacctcgtgatccgcccaccttatcctcccaaaatgctgggattacaggctgagccaccgtgcccggcctactttgcatattttaaagttggtcttccctcgctgcactctacttaggagactattaacattgcctccacctgcttggagcctcagctacaaccctgaaggtttatcatgaaatagctctgggggatctatctaaaacctgacatggcctctccctgcttgaaatccatcagttctttagcaagtgagaatgcagtccttgctttgagccagggcccctggaccgatggttctttcttctccactcataccttaggtccagctccctgcaatccgtgaccattttctacctccttgccttggcaagcactattccctctgcctagacactccaagttccacttcattcttgtcctctccaaattcatccctaaaaactctgctgggcaccaaccagtctctgctggctcccctgctctttctgaccattttcctgagttttatctttaggtttgtttgtgcacaaatgcatccatgtgtcacactgtataatttgttatggcattgagggactctggaagctctggaaaattccaaagccccatctcaatagcctcatctggaggtcatggctgggaggtagtgtgtggtagaccagaagccctgaccactaaacctccctaggaacctggacaagtcattttacttttggagctactgtttcctggtgtgctcatttcagaagtggtccgctgcttgctgttttctgccccgtcccccatcccttactcccgcggaagtcagcaacatgaagaggatacctgaacatgctttgatagactgtgattattggtggtattttaaggtgaaaaagacagatatatttgtttcatgaacttgtgttaaaaatgtctttccctgggggagccaagggtttttatatcagaggtaatcatctcatgttcttttaaaatgaaaagaaaatcagaaaagcaggaatcatacttgttgggagaaaagaacttactttggcctgaaaattttttgttcttgcttattgtgtctatcccacttggatgttcgtagagagagtggcggggagagagagaaagagagcacatgtataagagtttggaagcctgggtctagaaaggtttttgtcatggttttaccacttcttattcactcattaactaatcttggaagctctaattttctcatctgtgaagtggggataggtggaatttgcactgcctgattcacaggactgtttgaggaacaaatgagacaatgtatataaatacagtcaagtgtaatgtccatgtgtgggtttgtaatcattattccgtttggctactgtgtggggacccagagttagaacctgttcttgctatttgaggacaaatattgacctctagcatttgtgccaaaaataacaaagcaaatttccctgaaattagccagacccatggctgccagcccctcagggaactactcgtcaacagctggtgactatgcaacccacacctgtatttccacacccctgctccagaatataaggtctgcagaacctaggcacactgcttggaagagctatgctattttgctctaggaggcactccacttaaagtcgtattgttgtacatttaataaaaggcattcatagacacatcaaacgtttggggtaatcatgatgatatatttgagtaaaacatgttcacagatgctgaaaaaaaaacaacgttaagtgtcttgtttaaatcataaactcctcgggtagagcattgactttcaggggcaatgggcatttaattttctgtctgaactttattccctcttccacacctggggaagtaaataaaggctcagcaacttgcttgtgggggtgtgtgtgtaatttatactcccacatctgtttcagctaaagagagtatggctttctactgagtccatgccagctacatacttctctttgagtgtctaaaatgacagaggtgtttttaatgagggcaattataacagtctgactttagctcagagctaaggctgagacactctgtgtgtgtgtgtgtgtgtgtgtgtgtgtgtgtgtgtgtgtgtgtgtgtgtgagggagagaggaggatggggaagaggagattgattcatgaatgcagagtatctagaaagggtagaaagggtttttttctgctgcatggggctccctcagacagaggacaggagctggcagaacccagtgaggtctgcattttcggtggtgctgccttgctttctgctacccagaagtaggcttttaaggatgagggggaaactcatcatggttgatatatttcaaaccggttatatttgcatctcagatatttttatctctctaaaatgtgtgcttgtattcatcagaaaactgtgatttttttcccaaaatacaaccatttaaagaaacatttatgcaaagtaggaaacgataaagccattttatgaacttagtatcctcaacagggcctcacctctggttaaaccaggagccctcaaatctcccgccctgttcttcaggttctcaacaaatgcaccagccctggcccctcctcaccttcccccctcctcttccctgacacggtgccatggcaggtcacctgaggactgatttaaatggaaaatgccacatcctcagatagccaagcaagtgagtgttctcttagtacagcatcatttatgttgccttgagttgctgccgaaaaatataggccacagcatttaagaatcactaattagttttttgcctaatgaaaaacaaatggaaatgagtagtcggtatgcaagtatggtttggggcaatataaatataaaatacataaaaatataatatgaaaatatataaaaatagtaactcctaatgtttacttcacatttattatagcctgtcactgcattagtacattagactatctccttaattctcacaaggaccctgtgaaatggtactgtcttctctactttgaggatggggaaactgaggcacagagaggttcagcagatcatgccagatcacacggctggtgaggagtagagttgagcatgaaacccaacaagtcttctttctgcacctgcactctctcagccacggtgccacctgcaaccctaggaactggtgagaagtcctagaaatgaaggccgttcatgctgaaggcagcagtgagaatccaggtctaagatccttcttcaatcatccgatgctgaaaatttattgatgtgcacaagatggacactggatagaagaggacatccaggtaaagccagctttacacctgccttcagagagcttccagtttggtccagaaggcaagatgtgtagagaaatagctgcaatatgtggtatcaagggtaaaacaccagaagggttctacaggacatcgatagaaagaggaacagagggagcaaagagaaagggagagacagagagagagagggagagagagaggagagaagggagggggagaaggagggggagaaacagaatagagacagagaatgagactggagaaaatgtagttctaactcacagaaccagggtgtgcctcacggaggaagcagcttcaaggtgtgaaggaggggaagaagagtgatgggagaggggagggcaaggaagaatactccagatggagaaatggcatgaggaaaggtggggaagcttggtgcgtgaggagcagcaggtcacagggggaccaaggcttggtgtgagaagaagagcaggaggctggcatggacaatgaggacataagccctggaggtccctggaggccagacagctgctcaggagggaggccagggctggagttgtggcaaaccagtgggaggaggaaggtgcctgtgtgaagaccgtggcaacccacgctggtgagccaaggaagatggtgggagatgtggaggcaaaacccaatgagtgtgctctcctgtgagcccggggactagcagatttgaagagtaaagaacttgcctatcaggatggggtaccatttttttagagtaaagttagttttcaccactgatatactcagttaaagtttctaaaataatctgaaattttcacaatttggggtaaaaacatctgtggggtgtgctcgaaggaggtgacatttttgctaggcaggccatgtaggatgctttaggtgagaaagccctctttgcaataaggctcagagccttagcctcaccagatagcctttctaaggtccctatgtacaggtcaccctgactggttccttatgctgccaccattgtggtcttgttgaccagaccagggagggtcctaatacactgagttatgaggatatctcacaaagataaatcagattcaaagttaagtttgtactaacattgcctcaattcctttgggcttcagcgtgagttcgtagatggcaggagagtatttggagcattgctctgggtactttcttgaaagcatgttgagcacgtgaccttctaagagtgatgggtagcagagataagagtaagaaaacagttggaccacatggctgccagagtttctccaaacccagctgtgtgtgtgtcctccctggcttgaaatactgtgggacaagctcttgactttcagcgtcaatatccagacaatgtttcacgaatttccccaggggagttggtttcttggaatattggtgagtgactcatttctcctttcctagagctcctggaaatattgtaaaatataggacaagcattatcaccacagacctatcaggaaattttctttaaagaaaatactatgcgagactgcagggaggcactgaggatgtccaggtaactggagcatacagagcccatgcccgtggtggacaagcatctgcagtcttttccctgtcaggtacctctgcttccaagatgcacctattctaggtttggtccctagcttcccaggactcaaccacagtgctgaatcttggaaacaggcaggaatttcctgttggtctcatgactctcaatctatggcctcttttgtggttcagcgtctctctgggggctcttataccagggtgatcttccagacatcctaagccttgcggtggccaatgcctctcccacctggcttcatccaacccacaggcattgccaaaccatctctatttccaagaggaaagggaacagatgccatattagttcctttctttcccctttacttttccaggttgcccacaatccaagttctaagcaaactgagtcttccaacatccactctgcactcccagctccccgcattccatggcttgcctggacccttcccttccagccatggtctccacctacctctccaggcccattgctcatcacttctacactatgctcctgcccgacaagcccctttggtctctgaacacattgcattgcttcatccctcaattcaggtttcacttccgtttgacattctccctggctaacccattctgagtgcccatcccctctgcaccttagcaactgtacatactgtggatgtaggacttgtcattcttggagccatgacttacaaagtaacagagcaagtcagaggaaatagtcttgacaactccaggagcaactgaaacactataaaggatgaattcctctgtttccaaaaagggtaaaacgaaataccaaatcacaaccaaagaatgcatagaatgaatggaatgtccctgaacagctgtgagtttcctgacatgagatgctgaccagtcatttgttcagaattttccagaagaatttctgccccagaaagtagtgcaatacaatgacctgtaagagctcttctaaaatggtttcagggatgtagtgatagttccagggaaagaaatccctgattccttttgtttttctttgtatgacgttctttcttttatttgatcagaggtaggttgcggggtgccaggggtcaggtgggactgatgataggggcaggatggcaggccccaaggtaaggctggttagttactctgacatataagggatacttagaacaggggtccccaaaccccaggccgtggaccaatactggtccgcggcctgttagggactgggccacacagcatgaggtgagcagtaggtgagcatttccacctgagctgcacctcctgtcagatcagcagtgacattagattctcacaggagtgcgaaccctatttgaactgcccatgtgagggatctaggtggtgcacgcctcatgagaatctattgcctgatgatgtgaggtggaacagtttcactctgaaaccatccccaccccctcctcctgcccctggtccgtggaaaaattgtcttccatgaaactggtccctcatgccaaaaaggttggaggctgctgatttagaaaataatcacccggcccagcagcttgaccctgttttaaggagtcactcaagcccagtggtgagtttggtatggtcactagaatggcttacgtttgtctaatgatgcaatgttgtattacggagccccatgcaaaggtgctgtgggggactctggttaccatggtgctcaattctctcctgccttttaacttatgcctataacttcaatttagaggaatgaatcctagggaagcttagggttatgcatgctgctgtgggactatttgtcatgcttcaccttgagaactggctgggttgcagtgaagagtaattgattgattgattcattcattcattcatggctcagcctgtgtgcatctgtgaaaacacacagcctttgggagggccgtgatcaagttttgtgacaggagatttaagcctaaactgcctaatactgtataacccatgtggagccccttaatcagacagggaacccagtggggcatgataacagctccttcccaagccaggccactctggtcactatcagtatccagggaagtggtgtggttgcctgttctcaaaacaggatactatccctgctgaactctgccacagcattgtcaataggacagcagagagtcccagttattggaataacccctggaagccagcttgttccctacgcatgcaaaaaagtgtagggtgcagaaagatgtgcttcttcaatctctcatctgtgtcaatagttataaaagaaactaagtcaggggaatatttttaaaatgttcctttgagaaattcaattttataaccaaatgtgacatttactggggctggagactgaggaaaatttacagatggaaactgtattattttcttgtgcttcttgtcgtgtgttttcagcttgaacttctgtttggatagaggagggaagggacagaaggtgacccctttgttaggtatctaataattgattctcagcaacagagatctctgagaaggaaaatgaggaacaccgtcctaatctctgttgttcttttatctcttctttttttttctctatttacagttaatttcttcatttcagctttggcaaagatgatgcagattgattttttttttcctattcctctcactaagcacaacaaaaaaatcctggacaatatatatgacaaacttaagttgactctgaaaggtgaatagaggaagccataccagctagggaccttgatatctgaggaataacatgggagtgagctctctgagttctttttttttttttctatattgtttatccctgactggatactggagatgttagcaaattggaaatgtcaatagatgcagacaaaaatgccccaagcttgaattctttagccaaagacctaggagagaggtagtctaagaagacagaaaacctttgaacaataacctctgtagccaaacattatagaaaaaacagcaattccacctggaaagcaaaggctgggtggggagctttggctcccactcttatcaggtgtaatgctgcacccaaacctgttgtcaggatggtgtcagggaagacagagtggagattctgaattttccttcttgctaaaggacagtgagactccctggagaccatatggggagcctggtcctccacacggttctggtaataatgaggtatgtctccccagagccacaggggaggtattagaggagggccagtatagagtcaggatattcactgccatccagctgtaacaaggtcactcttgcaaagtgttggtggagaccaccacgtgagaagtagtaatgaggtgccccctcctatcccagccaggatggtgttgctggagacccagtagggatcctgagccttcattaccatccagcagtaaaaaggatgacaccttactagtgagcaatgaggtggttccctccttaactcaccagagtgatgtcagaggagtcctgctataatacaagatttcaataagatccagaatcttatagtaacaccaaaaatgcttaggtttcagtaaaaaattacctgtcataccaacagaaagagctaaaactgaatgactaaagacaaatatcaacactgatatgacccagattttataattatataaggaacctaatgcagcctgaaacaaatgaagaaaagtgctaacaaacaaatagtaagcctcagcaaaaaatcagcacttatggagaagaactggaaaaaaattcagaactaaaaattttaataactgaaataaaaaactcaatcgatgggctgaacagcagggtgggtaagacagagcaaagaaacagtgaacttgttgatagaacaatagaaattatataatctggacactagagagaaaatagacttaaaaaaatgaacagagccttgggaacatgtggggttgtaacaaaagatcaaacatttatgacacagaatatcaggaggagaagaaaaagaagatgaggctgaagaaagtattcaagggaataatggctgcaattttttcaaattaaaaaaaaaaaaaaacaactacagatccaaggagccaaatgaaacccatgcaagaaaaacccaaggtaattcactcagagacacatgataaacttctgaaaactaaagaaaaagaaaaaaatcatgaaagcagccagggagaagtagtgcattatcaatagggaaaggtaattcaagtgacagaggttttctacttagaaactgtggaggtcagaacaaaatagcataacatttttcaaccactgggaaaaaaaacattttcagctcagaattttatagcagcaaaaatgtctttcatgaattaaatgaaaatcaaggcactcaggcattttcagatgaaagaaaacaaagagaatttgtcaccagcagacctaccctgaaagaaaggaagttctctcaacaaaaaggaaataataaaagaagcaatcttgacacatcttagaggtagaaagaacatggaaagagaaaatatataggcaaacacagtagacttttcttgagttttctaaattatgcttgatggctgaagcacacattatagcatggtctactgtgattcttaatatatgtagaggaaatatttaagacaactatattttaaataggggaagggaaacgaatgtaaagggagctaagatttctatgtttcccttgaattggtcaatattaacagcagtagttaagagatacatatatatatgtatatatatatatataaattacattgtgtatatatacataaacacagaatgtaattcctagaacagccactgaaaaagctaaacaaagagatatattcaaaaacactatagataaatcaaagttgaattttagaaaatgttgaaataacccacagaatttcagaaaaaaaccccagagaatcacaaaacaaaaaacaaatagaaaacaaaaaattaaatggccaacctaagccttaacatgctaataattatattaaacataaatggtccaaatacaccaattaaaaaacagagattagcagagtgtataaaaagcaactccaactacatatcattaaaaaaaactcacttcaaatataatggtatgggtagattgaaagtaaaaagatggaaaaagatgtaccacacaagcattaatttaaaaaaagtatggcaatattattacacaaagtagactgcagagcaaagaaaatatgagagatggagagaaaaattacataataataaagattaaataatggagaatattacgttaagtgaagtaagccaggcgcagaaagaaaaatatatgtcctcactcatacttgagagctaaaaaattgatctaatggagtaatgagtagaacggtaaccagaagcctggaaggatcaggaggcagatgagcaaaggttggttagtgtatacaaaaatacatttagatagaaagaataagctccattgtttgatagcacagtagaatgactatagttaatgatgctgtgttgtatatttcaaaatagctagaagaaaacttgaaatgttcccaacacaaatgaataatatatgtttgaggtgatggatatcccaaataccctgacttgatcattccacattgtatgtatctatcaaaatatcacatgagatattcataaatatgaacaaccattaagtaccaatacaataaaggtttaatcaaccaagaatacatagcaatcctaaatgtgtatgcaacaaacaacagaggtgcaaaatatgtggagcaaaaactgatagaactgaaaggggaaataaatccacgaatatagttgaagatgccaacacccttctcttaacaattgttaggacaactacagagaaaatcggtaaggatacagagaaaatcaacatcatcaaccaacaggatcaaatcaatgtttatagaatttgccacacaacaacagcagaatacacgttctttccaaatgcccacagcatatataccaagacagacctcaacaaaagaattgaaatcataccgagtatgctctctgatcacaatggaatcgaacttttaaaaaataaaatttttttggtttcttttcttctttttctcttttttacttgtgccacccccatgtttgcttcctaccagtctagcatgtcattattctgaatgctgcagtgaggttgcagttcttcagaagtttttggagtacgatgtggttttcatggctcagagttttaaagaaaagggaggaatggactctccattctctttagcttctttattggaacactctctctgatcttggagaattagcataaccctcacatcgctctattgtgactgttcttggaacctttctatagaatactagaggaaagaggaagatagttagattctgagtctgtgtcatggaagatggatttgcatcttttgtgcagtttaaacagttttgtgacaaaaagaattaagcagagcagaaaaaatagctttccttatgaaatcaaaaatccaacagtaaacttccaattcagaaggcagaagtcaagaatgactgcatctgctgggggcccctctctcccccggggaccagtcattgcagaatcatgtcctttgtttatatcatccttttagcactgccgagccaagaaactcagttctgctcaaccgtgatgaatatttttccaaaaccacatattcacaatcatgagattctcattgacaattctgtggttcctaattttttaaaatatctatctgtgaggaagaaaaaatgactctctccacttttagctataaggtgggctattggccaagcacggccaggggcctctgtccctgacaggcagcagctgttcagcctccctgtcccagagcacagcagaaggcaggggagagggggtggaagcaggattcagggcgctcaaggcaagaattctttcccaaggctttatcctccctgggactgggtgctagggcagatggtgcttgcattttccatcactcagaaagccatggccagagacaggagggtggggaaggggagggaagaggtccaaacatcatttccggaagctcttcagattccctgcattttaaaatctcgtaattcttctctctgaataccacagagccaatgccatacaatgttgtggcatttgctgggccacattccctagtgagatgggagaagaattactgtgcctaaggcagcaaccagcttaaacattttcatttccttcttagctcttccaccaggaaatcctgctatcatcttccttgtcctctccctactccttgctgttcatttctcaactctgtgattttgtgcttccggccttagtcagagccagcctctctgttcctggttctctatgagaaggtgcctaggttcctgccttgatgagcaagtcaagactgtggactaggtgaacttcaagtcagtgtggaaaatgcccttgctctcaggagatatacactcaaatacttagggcaacatatcctgatgactataactcttaaatggagagagagagagagagaacacaaataaaggaggcaaatgtgacaaatgtttacaaacggggggatccaggtaatgggtatatcatgtgtattatattattcttgtggcttttctacagattttccatttttcaaaattaaaaaaagataaaaaatcagtatggtgagtgtaaactgcttcccctaagccccaggtcagaacaatggcctctgacctggggaagttgtatggtttgggtattgacctggctggatgtaccagttacttggtttcattccagtgtgtgatgctcttgcatggttcaccaggccatgctctggtaggagtatcgaatggtatccctaatattttaaatgcattgcttgtggctcttctgagccttgaggtgccgatactccaatgaagacccactgaatcaaaatctctgcggataaaagtaaataatatgcatttctttaaaccattcctatggatagatctaattttaagatggtaagacagagacttttgtctcctttggaaaacagtaaagataccaagaaactgaaggaaatcttcacttttgatgcaactatgaaatgcctacaacctcagaacatgtatgtagagggagggctattgttacatgcagcagaaattgggccaggataaaggtggtgagtgagaaacgatgcctagccccagaaatctatggcagagctggctgcccacagccttcttcatcctgggggcatagtcaaagcattaccaatgtttagagcaacaagatgaagatgtggtactggctatgagagccttcctggacagtgtgtgataccacaaagggactggaggaagcagagagacagaagaaaatgctcagatctgccattttgcaaagggaatctttttgtgtggctgagtggaaaagaaactgtggacagtgagcagctctgtggctgccaacctttgttagctgtgtgatgtaaggactaaacctctgacaaagcccggaattagacagaactttactctagcccaagagacttcttgctctgtgctatgcttcctgggcccttctcaacacttcctttcacaaattactgacccagaaagaaatcccctgtttcatgaggagccagcagtggatctatccaaaatattacaggaaaaaaaagacaagctggaagctgaacaatgacctagaaaagtaaggtgactagtaaatggtaaagcaaatatagaaatagtacagtgaatatagtaagtgaatattgaaatagaggccatatttatttagaaaaaagagaaagacactgatgaaaatataatcaaggacacagagtgtaatttgagaagatagagcaaaataaaaagaaaataaatatcaaactgaaaatgacagacatggaagacagaaaaagatgattcaacatatatagagtttgtatcctaggagaagaaaacagaattagcagaaaaatatttagatacatcattaagaaaattcagattggccaggtacggtggctcacgcctgtaatctcagcactttgggaggccgaagagggtggatcatgaagtcaggagatcgagaccatcctggataacacggtgaaaccccatctctactaaaaatacaaaaaaaattagccaggcgtagtggcgggcgcctgtagtcccagctactcgggaggctgaggcaggagaatggcgtgaacccgggaggcggagcttgcagtgagccgagatctggccactgcactccagcctgggcgacagagcaagactccgtctcaaaaaaaaaaaaaaaaaaaaaaaaagaaagttcagattaagctcaattcttaatattgatagagcatgctaggtcctggaggggaaaaggggattcatgggcactgatatatatcctaatatagttactgcacttcagagaaaaaagaaataattttacaggcatcaaagcataaagggcacatagaaaaggggaaaaacagactatctttagccttctctctagaaacattcaacaagacaatgggataagatctaaagtctttgggaaaataaagtgagatactacagttttatactcagccacactggtgttcaagcaaagaaatgcctgagagatatcttaaagatgcaagcactcaggaatgaaattctccatgggttttttttgaagatatcataaagggagctatagaaatataacttaagggaataaaggtcagcactagatgaactaggaataacagcgtaaccaattaaaaccaggcagggaaggtgaaggaggaaagaaactacatgaaaatagaaaatcaaagaatctcaatttaaacatactttatggtagggagacaaaagtttctgtctaaagaacaaagatgtaagtacagtatatattatagaagaacaaaatgaaactctcattctaccgaatttacaaaattgcaaattgcaacaaagcaaagcaaacaaagaacacaaaataaaatatgataaagaacaataaacatatttttaagatctagaggcttcatggaaaacaacttcaataaataaaagaccaaaatatagcaataggtaattactatggaaaaattcccaagatacattgttaagtaaaaaagctatttataaaagagaatatatggtagtgttccacttatgtttaagaaagcatacatatatattttttaaaattttataagatgtataactaaggacacaaaagcacacatatgtgtgagcatatgaataggatatctctggaaggatacacaagaaactcataacagtggttgtctctgggataggaaactgaactggagtctaggaagggtttttcattgtccacaattttaactatgggcttatattactttatatatatatatatatatatatatatatatatatatatatataaaatacttaaaaagctctacagatgattctagccagcactgggtgttgagcagccccagtttttcattccagggcttctgacaagctaatggtagttgtactgtatctcagtggtagggataaagtgatgattgctatctctgtttcatgtgggttttggcagaccagcaaagaatttcattgatttacttgtgtctgaaatttcttgatttcagaagaaggttacagtcaactaaaaaaacataaaaataaaaacaaaagcccaattatgaagttataaagtactggggctttgggtcttctaagctaccactgatacttttgtcttcatgctagaatgcctgcatttcaactcctctgaattaatagaatggcttcttagcgtatctcctggattctgacctctttgcctttcagttctccctctttcccacctttaccctgctggtcccttgcatcatgactccttgtgggcactccacaagacaccccgtgccctggatgcccagagtaacatggccccaagacacatgctgcaggtggacaggtcacccggtgcaatggctatttccatctttgctcctgttcttccccaggcaggagtaatcccaaacccacctgctgctcggtcctacactgattcctttttctcctgaatcctattttacacccaggtaatagctcataatttagcccttaattgttctccaattaccttatcggtgataatttttctccaacttgagtttgagctccttcatgggaaagaccatggggctctgtgttctaagccgatcccacatcttatggcctcccaccatcctcacagctactagcttagctcaggccaccctcctttctcgcctggtctacgccaggcaggtctccctgcttttcctcttgggcctcctgtggtctgttccctatatggcagccagagccatcactggcttcgaagtagaaataagctgacttatttccctggcttaaaaccctttccagcacacttgtgataagatctaagcttcaggtggcatggagttcctgcaggatctgtccctaggctccctccaccctcatttcccagccttctccccatcactcacactgcagtctttgactttcttgcccagtccttccccggggccattgtacttgccagaaaagctctcccactacccccctggagtggctctctatgtcatatcatccaggtcatggttacaatgtcacctcttccaaggccttccctgacaccatatctagcatagttcccatcttcactccctcatcacttcccaatgttttccctgcttaatttattgtagctttcgtcttcattgtgtatgtgggtagacagtataatctggggttagactctcagagtttaaatctcagctccactacttgagctgcatgacattgggaaagtccttaacctccttgtgcctcattttcctcatctgtacaatagggataatgttatacatagtttatgaaactacagtgagaataaaaggagagattaatgatatgaaaaccacttagaaggctgacaggcaggaggtgaggactacatcaatctttgtttctttatttactcattattgcccgactccctaccctagactgtcaactctggtgtattagtcaactcagcctactgtaacaaagtaccacaaactggagggcttaaacaacaggcatttattttctcaaagttctggaggctggaagtccaagaccaaggtttcagtggggctggttccttggaggcctctgtccttggcttggggatggcgtcttctccctgtgtccttatagggttgtccctctgtgtgtgcctgtgtcctcatcttctcttcttataagaccaccagtcagcttggattaaagcccaccctagtgacctcattttacctctatcacttctttaaaggctctatctccaaatacagtcccattctgaggtactgggggttaggacttcaacatacaaattttgagggcatgcaatttagcccctaacatctggagaagtagggttgcgacatggttagccctgtatctcagcaggcagacatgcatttttcagcacacttcagtgtctcagtaatgaccccttggaagcctgagagcatttcccacagagctggtccctctgccccacagccataaaacatggagtgactactgggtgccaagctgagaaggtacttgaggaatgtccttgagaagcaccaaactggggaacactccgggccttggattgtgttcactaaaatttaaatgactccttcatagcccagtggcaagtaggggaccatcagcctcactgaggtgttgatgctgggcccctgggcaagctggtgactggaaaggagaggagggtgtgggtaccctgagcttccagtagtggggctgtaggtcagcactcagtcaagtgggtggctcaagccccgctgcagaacacacctccactctaatcaaacaagcccatgtctatctcgttccttggcctgctcctcaagccccaagtaaggcttagaagacagcccttcttggaaccagtttccaatcttacataaggtgtcagaatcgccagtggttggaattcttccatgagagctgtggaaaagggctgtattttgcttacaatcaggtgaacctcactctatacaacagttgaatcccccaaacattgtgtgtgaattttaagtccaagtctaccttaaataggcagggctggagggggtcactatttatagtaaatatccaatgtgctttttttggcaagcagagaagtcttctattttaacttttctgttttgtaaatgtcacctttatacacacaggcatgcatgcatgtatacacattgtggcattcaagtctgtgaggaccaagtatctagctgtgctttaattctaaaaggcgaaggctttgttaagtagctcaaactgcaggggaaattatgatctgagttcaagctaatatatcacgaaaaagcctagacacagcatctgtcaacttgggtgatcttgcttctatctgggcagccacctggtaaatttgtattttgcaacagcagctgcagagactgtgtttaccctgtgtagatagtcagagaaatatgaagaaactgggggttcttcctcttctatttgtgctagcggtaggctgacttagttgaacacattctggcagttttgtaaaagagtacaatgccttagaattttgagctgctaagtcggtcccctcaacagccaggggagagacagggcagacatcttgactgatgtgtgacatcatttgttgccaggaggaaaaagcaggactggctccaagatgaagcagtcagacctacaggagagtagccacagctactggttttcaaaaggtaggacagagactcttaaaaaggctaggaagattcggacaaggtgaatggagagagccaacagcagagccgtgctcatgaagagcatagacaatcatggagagcatagacactcgacattcacagcagagaattactggtgaagatcaatgtagtaaaactgaggaaagaggaaaaacatgttttatagtcttttctttaacattttgcttattttgtgttatttgattcattaatattttaggcacagtaattcctgatttattagtatgtctgcttaaatgagtaaaacatggagtaataaaattttaggttcttagtttttgaaattcagagattgttacgcctgactacttactgtgcctccacagtaaccaacacagtagccccaatggctggaagcgaatttgactctttgcccatatgctataccctcagcttcttaatattgatgggtatcgcacaggtaccaactttgatttattgcaaatctgatttagagtgggtacagagagacttgaaagggctgtgtccatttatgactgaatttttgagagtttattcttcaggaagtacctctggtgccagacatttatatttttaacgatttggatgtattttgctttatgcacagggtgtggttgatatctacaatcgtttttgtgcatcaggaaataaggttattaaaatattattaaaataggtttccacaggcactttgctacatgtgacaaaatgcataattagctggaattaagagctaataggtttataacatcaacgccccacttctaaaataatatttagctgctacttatgtgcactgctgtaactcttgtaagaaaaaaaatgctccatggctcctaaaagtcttattggcttacattgtctctttaagcaattttaaaatataaaggtttttttttttttgtttttttttttttttggtgaagagagagaaggtgagcttctgctatattggcagtttggaggttgagtttaaactgcttgaaatgatgggacctcaggaaagaccatatgaaaatatcagcttttcaggccaatgagtcatccggcatcacaagccgggttgtggggcttgaggccggtttcagtctacgtcatccaacagctgacgcttgacagagacacaggaaaggaatatgcaattctccaattctctattttttttttttgttttaggtagattctcaccctgtcacccagtctagagtgcaatggtgtgatcttggctgactgcaatctctgcctcctacattcaagtgatcctcccacctcagcctcccaagtagctgggacaacaagtgtgcaccaccatgcctggttaatttttgtatttttaggagagaggaggtttcacgtgttggccagggtggtcttgaattcctgacctcaggtgagccacctgcctcagcctcccaaagagctaggattacaggtgtgagccaccatggccggccaggaatatccagttctttaatagtgtttcttttttaaaacattggcattcagattaaatatctgtatgccattgtttaatacaccgcaaaaacaagtcaggtgagagatgaaacctagagagaactagacaacaagttacccagacttgtaagctctgtgcatgattaggtagcttcaaatacaaagctttgaagatgtgcaggggtttcagaggtggagggactcaggcccttctggtagggccacgtgtttgcattgtcttattggactgttacaggagctgtctcttcaaaggcacttgctcctagcaaacttatgcctttccaaagtctcctctaaaaatgagtagaggacactttgttttacttttactgaagtgaaaacaccaaggcatgctttaggggtctctagcacttctgtgggtacatcagtccccattctccccatctgtctctctctctttttttttttttttttgagactgggtcttgttgtattgcccaggctggtcttgaaatttggggctcaagtgatcctcttgccttggactcccaaagtgctgggattacaggcatgagtcactgtgcctggcccagaaaaagatgttctctatgcccatgaggcttcaagagaagctggtttccttatcttcactatttagagctagatcccaagtacctccaggattgagccctaatcctgaccccaaacataatttgtgtacagaaactccgtgtaggagtgttagaaaagctggaggccctattgataggtgattcagatatgctgggaataatgtaaagtgtgtgtctggtggaaagagctgtatttttaacgtgatgctgaaatcaccaagaaatactctacttcacttgatacgaaaaacagaagttaccattatacagaaaaaaagtggaggaggccttatgcaaatattttcagataaccgtatatactgtttttttgccagtcgtgtcccatcatgtccacccccagttctcagctgtctgcatgggcaggagaggaaaggaaagacactggctggagggggaggcaggggcctgactcttctgagcttgaactgtctcattctgtacaatacggatccagctcctctttgagaagccagtggtagaacaagcaattttttgagctccttatagcttatctaattaatcattttatgaatggaggagccagcttagaaagaacttgtccatgtcatacccctgttaagggctgaggcactacgtgctcttgctgatgctttcataaatgataactcaggcactttcccactgtctggtttttatggggtggtttataatttggtgactggggacttcaacaccccactctcagtcttggacagatcatctagatagaagatcaacaaagaagtgttggatttaaactgcactcaagaccaaatggtcctaacagacatttacagaacatctcactcaaccgttgcagaacacacatttatgtgctcatcagcacatgaaactctcagcagtgtagatcgtgtgttagaccacaaaccaaatttcaacaaattaaaaaaaatcatatcaggaaacttcttagactactaacttaggtgttgctgtgaagatattttgtggatgtgatcataattggttgactttaaattaaggggaggttatcgcagataatctgagtgggcctgactcaattaggcaaagttctttaaacgctggcttgaagcttccctgagaaaagaagacattctgtctgtggatggtggattcagttcctgcctgagagctcctgcctgctgttcttggtggcctgcccttcaggctttaagacttgcttagtcagccctcacaattacataacacaatgtcttgtaataagcctcttactgtatatcacttcctcattctgcttctctattgaaccctgactggtataccaggagagacatcacaattaacaagtggatctgatgagttgggagaatacctttgggtttctatagatggatggaaggaggaaattggtccttgggtgggcacaggctgctggttcttcactgaaccaggagcccgacctttcacatacttttgtgcagcttttgctaaaggaacagacctggccggagctggacagtgaggccagggttgcattcaaatggaatgaccagctggacattggtccctgcctactggcaactggggagaatgagcaagaaaagtgtgggatcagaaactaagtacagagaatgtcaaaagggtccattggcaattcccacgaaacagcacttcagccagattcacctgccaccaggccatggtcaagaggaccatgtctcttgagatctgggggccacaggatgaactagagatggccaacggctgttggaaagagaaaggaggatgggaatgatgaataagcaatgaagattactggatgtcttcaatacaaaactacgcattacttagaacatatccttctaggttttctgattctagctattcattgccattcagctatttttacaatctctaaattgtagagaactgatggcagtgcagttataattggcaacgcaaacatgattattgtgtatagactggcaaataaattctgttaggtggatgctcaaataatatcccttctcatagaaaaagccatcttgacattccttaactccatagaaatgtgccattctttgacttcttctttgaatcttttgtaacatttatatgatttccttattaattaataagtgtaataaaatattttccatatgttagttttatatttgcctgagagtcatgattttacgctatttaaaaatcatcctttaataacacctgaggtgtctagggtactacagggagcaacatcagaggcagcatcgcactcagagtcagggacaaaaatctgtccagtgaggagagctgaggggtcactggcccccagaaagccccatgcagccaagcttgcagcagggacaatatgaatgaaagcaaactgttttatttttatttttaaaagttagggcaaaatacagatcctttatcttgccttttgagagtaatatcaagagatgcttttatagttttttgaagaagagtgaaatccatctctgcctcatctttatataaacatttgtttacgtatttgtactttatatcctacctgcttccaaaaacaacaattgaaatgggccaaacggtaataaaagcgacaataatagattgtgtagcagaccagaccttaccttgcaaagagtgatgtcagctgtagaaccacacagcagatggtgaaaaaccatatgataaaaataacagaaggttacacggtaaatatattaccacaacaatcaggcagcgaagagactggtgaacagagagggaaaagccagggggcagaaggatcatccaaggtcatgatctctgagatattaatggtaccttgcactttgggtttatatgtcaacagtctctgaagagccaggtgtggttgcactttcattaggacttggcctttatatagcaggtagctggggacagaaaggtccagggctgggcagcagaaatcgctagttcttgtgtggatggaaacactggtgcaggaatggggaccatcttttccctaagacctcacagccagctgggagaatgaagttgaaggccagctctctggctgctccgggcatcctatgtatctggccatgttgcctccagcactatggggacagtggggatggctatgtcaggggtctcagagcactttgcaaacaatgcaataaatacggtggagggtagcacattctcctattaatatacatgactacagctagcgagatcattactgcaaagtttagggcaagttgtatgagatctgcgattacagagatttgtactgtctggaatataatttttaaaaattctccagaaagcctttttaaggaaaatatcacagaattaaactgaatgtgtgtgtatcctataaaacatggtgtgccttcaacaagtaaattatacatcttatcaagagaagcatttggaaaactaagataaaatgtgaattctcttaccatctagaggctgctattcagagaaggatgcagattaaagctgagttccagacaagggaggagaaacatctctctgggatttgtgggaaaaatataaatcgaacttgaaaggtcccgaggaagtagcggtccatgcatgtttacacaaagggaagatgtgttagtcggaaaatcagaggactaacctcagaaccctggaaatgtaccagttaggggacaatccctgtgtaaattctcacagctcaagacctgtgcaatattctaagcagaattacaaagggctctcacaacgggcaggcagggctggggttgggtggagaggggaggacagaggcgctggcaatcatcaaacaaaatgaaaatgttcttcagaatccacagtacacaagattcttggaagctatttatgtggatgacagttttacaacatggctctcaagctgtgtgtttggtgtttcactcacagtttagaagagggaaaaacgcagtagagaatggtgatggagcacccattgcctgttgggcaagaaattcacagtggccctgggatagagagccaggctttgtggatccctgagctgtgctctaggcagtgaattctttagggatgatcgaagcaggctgtgagtggatcgcctgggtggcttggagtcaatcatgaatcacacactctggggacatggagggatagaagccatgcccatcatgaggcacctttgattgacaaggggctgctctcccatttccatggcctccacggccgagccctcatatgagtgacccctcttctaaccttaatacactactggctaacagttattgagcacctactgtatgccaagcattcctttctgggtaataattcatagaaataatccaagaggtgtttttacagatctgagtggagaaactcatcaggtaagttagttagtttgtgttttaaatgtacaaccattttcctaagttgtcagttccaataattcttggatctggttaagctggatcctgataggaacatttgcctcgggcttttacatgtttgtgtaatttgggtttagctcacctgctcatttcaaaccctgtcaggagctggaacaatttctacctgcgatgtaggtggctgatgacatggactgatttgaaggaagtagacaggttctagctaaccctgagtagcctccctcacccttcaagctacatggtgtctttatccttgaatgatttaattccactttgtcattcacacatctgaattaggtagcaaaatcctatttaggctcctttaagaggccagcctggaaaacctactcatcccctaccactggcctattggttgaccagatggcagtggtccctttagcagatgctaagtagtgaagtctgggctttaggacttggcagctaaaaggaaagactgagtggcttccaagggtagacccaaggggtggggtgctatagatagtaggaagtgaaaagcaaagggccagctcaggcagagggtaggccaagacaaggcatttgctgcagagaatggcacaggtccctgggaggatgaagggaaggagaaaggagaacacacttctctgagtgggcatcttgcatagaaacatatttcctggaagagggagacaggagctgtagccagatgatacattttcccttttctgatgctcatgtatgttgcaatgaccaggaaggcatgcaatccatggaggatttcccacccacccccgcccccaccccccggccccagccacctggcctgctgaaaacagataggcacatggcattgtatctctggtgagataaattaaagatctgaaagcaatatgccatcaatagccagcattaaacagagatcgcaggagtggaacagaccttttaagcatctgttttctttgaagctcagtatttctctctttggcacaggcccagctacctaactggcaaagacccaaacccatcccagaattgcctcttgggatccaaaatagccagtccatcaggatggaacattctctctctgccttgctttcagcactgttagaataattctgagatatttcagacagtacattaaaaatacttagaacaattcaaaattttgttttttttggtttccaaaagcagctcttaggaaggcatttaaaaccaactgtaaatcatttgaaagtaaatttgtacacagtacaatgtatgcccaaatggtctggttcctttattatcagacatttatatttgatgatgtctataaatttttgagtgacttttcaagggggtcatcttgctaacatcaaagggtgatctgatgatgccatcgtccatcatggctcattctcttcctacagcttctgcacccggtgggttctgcttttgaactgtagcttggcctgactactcatgtgagccttgtggtgtgatctgggaaattctttgtgcatcttacagactcaaacaccaatcccaagtcttggaagatgcaccattatctctatctacccagattttttttggccacaatcatgcattttcttactttcctgattcttctctcccattcattacctttttttttcctattttcattccctcctcttgatgttgagggctccactgactgccattgacacaagagcttagtatggatggaggggacagtttcaagtggatgagaactatcatggcaaatgacaggatagttggattgggcacaccttgcatcctgtaccgtggggggagccatggccatgaagatagcttgcatgacatcatagccatgatagtcattgaacatgtgttgtgtccactcctctgatcctggtgttctgctctgccttgcaccgtaatcacagacgaatgccagagctcaaaccaaaacctggacttcgtgttccaggtgggtgggaattgaagcaagaaatgcaaggctgatatagaccctgtacacctcccacccacgtatctggcagaatgttcaggtgaagggctagaagagggcccgatgagggcagaggccagctctacccttgacaggaggacagaaatctgggcacaaccacaccctgggctctgagactttttcctgaataacagtaagatttgtactctggggtattcttcctacatgactcatggctctctcttcaaatctggaagaagttgcctgaagaacagtgtgctcttgcagacagatgagtaaaccggcagacagatgggtggacttctagataaacagtgatggagagaggtgaggctgcagcatgcaatgtgcccagagtcacagaagtttggtattgtggtttatttcccattcacaaagtataaccacctgttttttcttctattttttaacgaaaagctttttaaaaacctgttaagaaacaaaatgattcttggacattaggcagctgttaaaatgttttgatgggtttagaataaataactcagaaacatatggatttgatttttcataagttaaatgtgtgtattttcaaatgagaagcaaatttcccaggaaaatacagttcagtttttttttgacggggattgtgggagaaggttggttattaaacaaacaaatgtaagcacacaaatcaaagtgaagaggtatggggcacggatgtcctaagagctactctggtccatcaacacagggcaaggcagaaaaacaaggctgtcctcagggagcttacctggttaattcattaactaacgtgtgaaatgacatctgaaggagtcatcaagaatgagtatatctatcaggatggagtagcacaccccagacctagaagtctaatcaaggctgcctgatgttcaagaagccataactaataacatgcctagaaataatatgtgggcaaacctaagcaaatcagttgcctggagtctggatcttacaaagtcaaagggcaaggcttcctctgtgtcaccggcattagttagggaatggggcaccttggccaccaacaggaagttttcagtgcacccaggaggtgcagcctacaggaggaataggtgactgatgatcatggcttaataacactcatttgcttcacctaactgcactcccaaggctctttgcccaaccttctgatcataactttgctccctcaatcaatttttctcccaatagtgatgtttcctaagttggctttgtggtttatgtatcagtcttctgtgagtttagttcatgtgaatctgcgcctccaagatcaatactctctataggcctgatatggtttgactgtgtccccacccgaatctcatcttgaattgtaatccccataatcctcacatgtcatgggagggaactggtcggaggtaattgaaccatggggtcagtttcccccatgctgttctcatgatagtgtgttcttatgagatctgctggttttatgagcatctgacatttcccctgctgtcactcattctctctcttgccgaactgtgaagaggtgccttccaccatgattgtaagtttcctgaggcctccccagccatgtggaactgtcagtcaattatacctcattcctttataaattacccagtctcaggtatttcttcatagcaacgttgagaacagactaataatgtcaaggcccttgacaaagcctagctgtttctcctgctgggctgaaggtgagactctggaacacagtgacgactaatcattacttgccaggctcacccagcacaacatcaccatcccagccatgcatgcgctgcagtcgtttcttattaatatcataacactgagactgccgacgatggctgtcattgattccagcttaccacatgccaagcacgttacgcgaatccttgcagtaaatcctcacagtgactctatgggcagataccattattggtgttagtttacagaggagaaaactgagactaaaccaggtgaataacttttccaaagatctcatcactggtggccaatggggataactggattgaggccaggcagactagtgcagtcagtgtacctaaccgtccattgacctgatctcttaaaccagctctctaaacacaccaaccacaactagctgagcattgctagcagtgtgcatactcgtctaggcttggtgtcttttcattgaccctaatctataagtgtttctgcactgaaaagccttttttagaacccactatgtaggactagaaatagaaatatgagcaaattattgactttctcactctccctgttctctcttcttaaacctccagcatcttctccccatcctcactcttagctgaagacacagcttccaccttcaccaagaaatctgtcaccattacaagggaacatccacaaactaccagatcacatctatccacgcttccacttgtaccttttatccctcccttttgccctctactggacagcattgctcagcatttacctcattcctcagcatttttccagtccttcccatcagctgttaccactccaccctgcaaagaaaactgcgtcttatctccactccctcttcaacttctatctccatttctctgctcactttcacagcagaactccttagaaaactcggccatacttgcttttcccatttcctctgcctccatctctcttaaactcatcctaatcaggggttcaccctctcccttccctgctccctggaagctgctcctgtctgggcccgcagtagcacccagcccaatggatgtcatcactgggggaggaggcctgtcttgctggcccatcagccgcaggccacacctgatcatccctcccccttgaaacgtcactttcacttggtctctcaccaactcctcttttctttttccttttctttgctggtttctcactatttgggatgccccagggctcactaggacatgttctcttctctatcctcattctcattttcaatacccagtggccagatttattatctccagcccttgaactccagactcatataacagactgacagcttgacttctccatttggatgtctaataaatatctcaaaattcacctgaccaaaactgaactttgatactagtctggatttaatgtcatttaatttatcccaaattataagtatttatgcattcaaaagtctttctgatgaacccactctgtagggtctaaggatagaaagatgaacaaattattcactgtcccactcagccacacccacgcctacactcagctgtcctcagggctctctgatgaacactgggaggaatgatgggagggtgacaatgccttcttccatttgctcaggcctcaaccttagagtcactatgtctgtcccttttctgtgacagttcacattcgatctcttagaaagccctttaaacacattcacaatccaagcacggctccacctccaccactgccaccctcctgacccaagccaccatctctgcaatgacctgactggcctctctgtgtccactgctgtgccctgcaaaactattctcagcacagcaagccacggtagtcctttcaaaacataagtcagattctggcagttctgctccaaacctctttctctcaacaaagccagagtcactctatgcccagcagtctgtttccgacgattggcgaggtcctgagagcagggctgtctcatggggacacatgctcctcccctgccctcagccataagtgattctagaaatgaatgtgcaaggctggtggagctctctctggaacacagttatccccttccagagtgaattataattctccccaacaaacaggcattatttttgtaaaataaaaaaatcttattttaaaaaagaattgaaaagcagaagccttccaggacttgaaccacagttggcctattccctctctccccagcacagtgcttagcggggagcctccacctttcctatgaattcaaaatgccaagctcgcccatcctgcttcctcctcccccttcttcccagtgctttttgaccccaagccaacctggagagccagaggtggggacagagtgagcagccagggcgctaatcttcctgggggccaggtcacaggaggctcctggcttctaccctagggttcctcggggtttaattgctggtggttttatgcttctgaagctgctgcaggatgtgcagctgcaaacagcttactgtttcgattttcccttattgctggcctcacacttcaatacttatgtgaaacttaaaagtaattttctctttgaaccaggctcagaaggtagaaggaaaaccatggccttttccacagcagccatctcagggtcagtgactatcagtgcccacaaacccggcctccagaaaatggaactcttgtgctagtctgcaggtgtttccatacaaggaacacctccggtgggcctctcagcccctcatttattcttttagtactaaataattcagggctctaacagcgttggagggtggcttataaagttgaaaagtaatttgtaaagatctgcaagttttgactctgtgttgagctttgaaataatgaagaatcaatggggaccatcgatagtattagccaacatttaatgggctcagaaccagctatataatttgtggggcctagtgtaaaacaaaaatgcagggccctttgtgcaaaaattgttacaaatttcaagacaatgatggcagagcattaaatcaagcatggggccttctgagcatggggtcctgtgcaactgccttggtggcaggcctgtgtctgggcacaggctgtgccaggctctaaggtacacactggaccgggccgtctcatttcacactcaccagacactttgggacagacacccataatattcccattttacagatgagctaactgacggtttcaggggttaagtaacttgccaaaagtcacccaattaacaaaaaagagagccaggattcaaatccaggtagtctgatccctagagaagccgtcctcaaagagttatatttttaatatttttactatccatgctttcctattacaaataacattcatttttgcatcatcatagtcattacttatcccaggacatttgaaaaaataagaaaaagcctaaagaagacaattaaaatcacccaaaataatgatatcagtgcatatatgttctgtccttttttcaaagtatattttatatacaaaacaaatttatgttatatatgtatatatgaaatatatatataaattaaacacctcatttacagcattgcatgtctttaggttgagagttgaacaaacaggctcactatgaaacatacgtgggtggatccatgtagacaggctggaaaacccagcaacaattggacaagttggccaagtccaagttcagaggggctgtggggataatgtaatacatgaaatcacatactttgaagtagaagcaacattaaacctgaggcaagacctgaggcaagcttgcttcaaccacccaaaaaatcatggactgccagtgctcaaagagtgaagagtcccctgtaaatatctgtagcttcactatttagtttttcttgtggggtccaagtcagaataaacttaacatttttattactatgagtcatgttccaaagtgccctgcccttgagttgatgtcgaatggttttacaagttttttgtacctggatgtcattgaaacactatttgcatgtgctatagtgaacccagaatggtgggattaagttaaaaaaggcaaacccaccaacgcctaattggggaaatagcaaactctgatttaatcacagtgataaaataaaaatccaccctctcaccttttctccccaggtctctcctgataactctgaaagtctaaaacagcagtaccattcttccctgccaaaggtattatctgcagtttctaccatgaaatacacaggtcaacagttggtaggaaaactgaccgcatgagaacattcctgcagtttttatctaatgatgttgaaacagctctctgcaggatgtgcagagggaaagaatcactgatctgtgagatgcttcttccctcaaacagaaaaacttgagtgtcaagtataaaatccagatgaacaagttgctttccaaataaaaggaaaagagctggaatattctgttaatgcatcaaacctaatgtggagtaaatgacattaaatcttggctaggctaacaggccaccgagatttagacctgcaggctaagttggctcttccttatggaaggcagaacagaaatactgctgctcaacgtgtatttccccacctacagtcggatcggccacaggtggcctttgaggacacttgtccctctcacttcttcctctccagaggctgatttcctgggactgtggatttgaacactccattgttttagttggaacttaatagaataccaggtttcagaacaaaagtgggtgtatattgtctgtctctttttctggcgcatgccggaagttcatacacttaatttatttgacattttgcaagataaagcacaagttggagaagagaaaattcaagagaaagaaaaggcatcataagacttttcttaaagaaagtgtatgtcaaagaaatgacttaattctgagagtacactccataggaatggatgactaaatggtttcatttagagacagctctttttgtgagtttctgtcctctatcaatctgcacggtggaaacaataagcactgagctttgaacaaccaaggtttgagggagaaaacacagtaaaatgctagtttcaaaataagtaatcttcaagcataattgaattattcctgagcatggagttgtaatgtcatatcccattgtgactactgctgcatttgtgggattttttttttttaaagaattaccttctttagagaggaacagagataataagtattttttatcaatatcctcatattcaacctctttccctaaactgtgaattgaaattctaagcaaatagctttgcagaattgcaatgatttgcttagcagtgttctgagttaggcaagtagtgaaaccagctcagcacagcaactgctttctaggcatccctgtggtgggccagcctgcccttccagcaggcttgcaggtctaccagcctcctgttaccaagtccagcccagccctatggcaagaaaccaggactggcatgaaagatggaagagcttagcatgaggccttaccagcaccagaaagtaggaaacttgtgtgctccaagcatgcgcttctttttgcccggttgaaatttgatcaaggtaccaaatgtgtctaacatactatgtctaccactgaatcacaaagggaaaaatacaggtggggctgggtggggaaagagggtccgggagggaaaggtagagcggtatgtgggagggggacaggggcatgtgacgaccagcactcacccccactggaaggctgtctgccttgtcacatgcttgctgtgaaaatggcgatcccgtgtgatgttcctgatagaccaacaccacagagtttcacaattatttgtgcgtatgcctgaatccagtactagactgtgaccttcttgagggcagggaccgtgtattgatcatcattcacgcctgcatatggctcttcagggaggtttgtaaaggagatgattgagaaagaccataggaatctatcctcaacagcaagtcaatgcaacagacggtgatcttgctatgatctggctaggtgccaagtacagtagtgagctgagtactgagtaatgggagtggtcatgcatgagacatattcccttcccccaaattgctcagtgtctagatagggccatggcaggtttatgactaactccatagagaatttgtacaggtcaggatgttagctgaaattgactctgaggacagggaaaggtggtgtgaaatgcctccagaacaaaggtgggttgcatttactggaccccctgcagcacgtatgctcccactggattcctagtgatgctccagcactaaacttgtgattatgaggcttctctgcactggaaaaaggcagctcagtgggcagagtggtaagggggttggctatgacctatactggctactcccagctccatccctgcgtgagtgatatccaggactacactaagttcactgtgcctcagttcatccgagatcatgtccaggtacagaggaaggcctatttgcccaaaataacattgctctcttccccggctgaagactgggtcctgtttgtttctagggttacagacaaagtaaaattatggaacttgccaggtatcaggaaaaactcaatgtctgccttgaaatgaagtgtgtgtgtgtgtgtgtgtgtgtgtgtgtgtgtgtgtgtgtgacagagagagagagagacagagagagagacatgcatgtcggattgggaggagagatggttccaggttggataaaaatattttccaaaaagaatcttggatttgaaggtggcctgttattttctatagggtccaaaacggaagtaaaaaaaccctttgactcacctataggtttttatagaaatttacacctaatttcttatttcaaatggatgaaatgttggctgggcatggtggctcacactgtaatcccagcactttgggaagctgaggcaggtggatcatttgaggtcaggaagtcgagaccagcctggccaacatggtgaaacccggctctaaaaatacaaaaaaaaaaaaattagccgagtatgattgataattacaggtggcaggcacctataatcccagttactcgggagactgaggcaggagaattgcttgaacccaggagggagaggttgcagtgatccgagattgcacctgggtgacacagcaagactccgtctcaaaaaagaacaaaatgtgcattgtccaggaaaaaaggagtcacaacagcttttgtcaagcacattgtacaccacctctcacctctgcagagaaacattggaatttagtcctggtttgggggaaactcagactctcgcatctacaaagggcatgggccatgccagggctatgggccaaactcactatcttcttcccactcaagtgaaggagggaagtggggaatgctcctctgtaagatccccaaacaaagaagtcctgattgataaaacggcagggatgggagcctcagaaaatgggattcccaagagtgagggaggaagaaggaagtgcacagtcaagcaagggttaatcagacggctttgcattttctgttattgcattttctgttaccgcccttcaaaggttaatagatgggccataacaaaggacttcctcaggaatacatttaggaaattttgggatcaacaaagtaagtgtttttatccagggctttccaggcgtgaagcatatttcccaagctggcttgacatcagagtctttttagtggaagacctattgacaactcacgaatctcatcctccaaggaaaacagatgagaaccctgctctaggttgtcagaaggcaaacttcaaaagaattcagagaacatgtggataagagcccatggatagagatggctcaggagggatgggaggatctgaaaattaaaatctgacaagaaaagctcaaagggcacagaagaggcagaagggcaaggcaactcaagtcaagactgcccatgacaacttgagctgatgcagacgtggagagtctggaggcaggcaggcaaccttccctctgtgcttttttttcaggggttcactaaatatttattgagcctattttctgtatcaggggctgagcctagcacaagctgggatgcacccaaaggaaggcagtcaggagtggaaagctccgggattctgatgtggagaaagttgtagaaagtaaatatatttagtctgtgtcttagtcatctcgggctaccataacaaaatacaattgactggatggttgaaacaacagacatttatttctcacagctctggaggctgggaactctaagatgaactgttggcaggggtcagttcctggtaagggctcctttcctagcctatagatgggcagacctcttgctatatcttcacttggcctttcctctctgcatggagagagagagagagagagagagaaagtgctcttcctctgcttcttttgttgttgttgttattgttgttttgagacagcatcttgctcatgctggagttcagtggcacgatcacagctcactataatctccaactcctgggcacaagggagcctcccatgttgaccttccaaagtgccgggattacaagtatgagtctccacctcttcttcctcgtcttctaagaccacctatcctattgccctcatgatgggccccaccttcattaccttatctaatcctaaatacctcccaaagttctcatctccaaatgccaccacgctgggggttagggcttcatcatataaaccttgtggggacatgaacattcagtctacagcagtctgtagacaaaaggacagctgggtcctgacagttgccttcaggtggacagtaaatagggcagtgctaagaccaacaggaggaaatttgtgaccagagacttgggggtctcacagctaaagctgcttaaacattatagggcttctgtgttaggtagcaagtgccctgtctttggaagcatccaagcaggggctggcagttttcaccttaaggttgttacaagtgggattcctatggaggtgagaattcagttagaagctcccagaccctccacttctacagttttatgtgggttcactccataagcattttcttcctttttaattctctactgtgtgcccaggatggtttttctgtcctgtttccaaagcagtgtgagcaggagggggttgtagccttgggttgacagatgagcgtgctgggtatacaatcaatatgtgtgctcagaatccacacaacaggcttgggtttcttggtaacagaagtgctggggagatggggctgctctattaaagtttagtttcataaaccttatccacagagggcgatgaaaactacagcacatgggcaggtggcatcaggaaaccactgcatgactgggcatggatttattgcactcttcaatgctcctttatgtgccacttacacgcagcaaataccagcccttcgcccccagcctttcctcttgcagggtcacccattaatggaagaaggcagacaggtataactatgtttcttcactttggccaaattcctcatggtttatagaaaacagcaagaggtaaggcttgtgagaatggacaagctccaactgtggtgggaggcaggcagggacacagcaggccagtcaccacgggcacttttagtgcatttgccatgcccagcatcctattgctactaaatcgacttaagctcgacaaaaataaaaacagtctctgccttacaggcactttagagtttgcaaactgccttcatgcatggaatgtttcataggacacaaagaaaaggcagcaatattattccatagtcatagggcttgtgtgtgcgtgagtgtgttgtgtgcaaacaagtgggcatgcacatttgtgtgtgtgtgtgcactcatgagtgatagtgcatgtgtgtggatgcatgtgtgtatgctcatgtgcctgtgtgtttgtatgcatatgtgggtctgtatgtgcatgtgtattcacgcgcttttacgccggtgcaggccttcactctagatagtagaaataagagacctgaagtctagctcccagctctgtctccaagtagttgggtaacctgggagttgcttcacctccttatgcctttggcagtttttgctgaaaatgtaggcttgccccagaatctaggagttgataaactcttttctagaaagggccagctattaagtattttactctttgcaagtcccatgtagtctctgtaatagttttattttctccccaaccttttaaaaatgtaaaagccattcttagctcaagccttacaaaaacaagtggtcttgtggccctggaatagagcctgcagacccctacagattaccccttttagccccagcaggattgagcccctgcctaaatgaatgagttgtcactagcatgcatgcttcatgttactggggagcttgtcatctgatggtcttgcttgaccaagcacctagtgccaggtgggacatggctgtgtttccaggtgccaggcggcgggcaccgtcttggcttctctgcctgggggaaggcttatgtaaatgcatttgaagtttccctgctcccaaagtcccgggcttcagaaccagacaggcacgggtctgaatcctcattctgtcactttctgattgtttagtgcttggaaagtcatgtcactactctggaacttggacaactgtgttcaaaattgttcagattcctttcagatttgaaattgtcagattgactcttagtgatgcttgacagttaagcattttgaatcccttggtaggtataaacctttaatgtttgcaggggctaagaaataagtgagcccctgttggctttccaggttggtgaccccagaggactggtgttcaaggaagctgcctgtttgccagaagctgagctgcaatccacagaggcatgaatgctcgtccactcacctgttcttcatcatgggatgcatctgtggtaagtctatgtgtctcctgaaaagtgttccagaaggttggcatctgtttaaaaagtctaaagcaatgaagtcaccttactactttgctcgtgtagaaatctttctactcggggaactgcatgtcaggattcttgattctctagtatgtctgggcctataagccaggtgtgtcgtcagggctctatggatgcatttccgcacctcacatccatctcacttaagaatgcatcaagtagcgcagcaatggcagtgccttctgcagcttagagggaggcacaggtgttcaccttgttcctctcaagttcatggtcatgcttgctgggctggcgggctaccacgactgagaccctcgtctccctcactcctcctttccagcttctctctgcatctcagcttcctgcctcctttctgtttccatcacagccttccagggagcatcatctctctgcccgcatctgtagtcttttaaaaactgctactccattgtctaccctgttgctgggttaaccttccccagaagccacattgccttctgctaccccaagttaccatttactcagaaaactttcaggcctgcccaaagccccaaagtaaaagtcaaatttcacaaaaactcagagttccatagtctatctgcccccaacctacccttctatctttatctcagaatatctttataagtagagtcacctggctctcatccccagggacctaggaccactgggtcaggaagaggggcagacactgggctgagagctgtggcctgcaggaacccactgcttaaaccaagctaggctacttatgggtcctaaataatgtgcgtctcacttctacagtcagaataaaataatggagggcattaattataaatgactacctgccctcctgcttctcaaccttctgctgcagttttctgcctcctttgccttcaatgctggtctagagcttcttgttctcagagaaatcttcttccttttatctcagcacttatggctgttatttctctgccatgctttctgagcactgtagatggttccctgtgttgggatccatctgtctagccagtcctatctcattctgtccatcctatccctggattgactgcaccctgagtgcttggtgaagaaacaggttagaattaattctgaactgaaaatcatttcctaggaaaggccacttcatcacatagcagggctcatggggtcctcttgggggaggtacagtggtggggagcagaggaaagggtctgacacagccacctttgtcagtattgccccaaagcctggaagacatggacacaggtgcttgtgtcttatggtaggcagaattcaaaggtggcccccaagatccttgctgcttgggggacacacacctgctcccaattatccaatcaaatgctaaacagagacttctgagaagaagagatacaattaagattcccaatgaattgactttaagagagggagatgatcctgtgggggcagacctgagcacttcaaagtgaccccattcttccttgcaagagagatttgaaacatgagagggattcaaagcatgcaagcccacatggaggggacacgtggtgaggcactgagacagcagtcccaggaggggagcacagtctccacctgacagccacaagaatgggaatctcagtcctgcagcctcaaggaattgaattctgccaacagccacgtgagtttgcaagaggacccaggaatgaatgcagccctgctaacaccttgatttcagccttgggcaaagcccagccaagcctgcacttctgacatctggaagctgtgagatgatcaatggatggtactgcaagatgctaagtttgcagtcacttgttatgcagcagtagatgactactgcatgccttctgccctccaaacttgcctttctcgaggttattttcctttataatttattaacacatggcatcaccaggctcatgaattgcaccaaggagtcctgggaaggctgttatctcttggtggataaaatgacacgatttgcttattacggatccaacagacattctcccagagcagagtgggctggaaagaatgaggatcctccacttctcaagactctttttgctacctgctgccaaaattcctagcctgttaaccacagctctccaaaaaattgggggtaggggaaagcttatattttttaaaaacccaactcttgatcttttgttatcagagctccaagttaacctaactctgcaccagaggcctgggtcatgtttaatgctggactagagtatgcagctgctcactcttactgagacacccttggtttctcagtgttgcctggtgacagccagacacctgggcaccacctgcaggtccttgctgccatggaccagtagcttttccccgaaagtaagaaaacagagttaataatttgggtttggggatggatcatcctgggtctttccaagctccttaaagaatctcatgtaattagagctaacctgtcccaatttcaaatcaaaaggtaacatgattaatatactctaaaaatagaggtagctaaaggcacttttaataaggcatcacgcatataggctacttttaagtataacctacgattaagtctctggatttgcccgctgaaggaagctgaaattgagaacccctcttaacagacgaagagctgcctgctgcctctccattttcactttgcaactcttcagcctccttcaaagcctagctgtcactctggcttcagagccatttctagaacctctggcttccactttttgagggctggaatcgtgactttcaggtatcttttccccagcccctagcagtttgctgacacacagaaagccctcagggaatgttgatttaattagttaaaattcaactatttcccccaccacctgatccaaccttgtttttttttttttttttcttttctaaatttcactcatcctctgttccggctgacagacagtagtgtgggccatccacccccactcccaggaagaaagcccttccttccctctcctaccctcaccactgcctgaaggcttctgagcctgcttgggaagctcagctatggtctcctggtgaccaaggagtttcctgcatcctgttatcccctgctgagaactttggtcaagtcacccttgtgtgggaggctcccaaagtgaaataactcttagaccaaccttgtaaagaaccacggtagggctgctctgttttatagccataccttaccccagagttagcacagggtcctgtattgactaaccctcccccagccccatcctcatgcctggttatgaatcccaggttggcttcctgcaaaaccaagccccttccaagtcgggttatagttttcagtggttgctatcatgcatccactcctcaaatcttttttaagtgccccttataggccagttactgttccaggtactgaaactcagcagtgaataagacaaagtccttgccttcatggagcttgcattttggtgggagataaaagccagaaataacagctgtgtattctagctgtaacctaaatctcaggaaatgttacgtgctgtaaattcaagatgtgtaagaagataatgagtgatgtgtggtggtgattttagggtggtctgggatcccctctctgatgagatgaccttcaagaagaaacaggatggatgtgaaggggcaaattttacaaagttctggggaaaaaggtgatctggagagggatctgtaagtgcaaagatcctgaggttagaacaaacttgacttccagcccttcaccatgaaaaatgcctcaatgattgaatatagcttctctttttcctatcctgcagaatgtggaaggaaagtcacgggagctgggtcaaggcaaaggaagacaagatcagaggaagccttcacctgcttgttgggcaggtggcctctgaagctgtgtgggcctgaggcagtcagccaggctggccagaccaaggcttgttgctgccatagctggagctgtgtagggaaggtgggatgagatgccatgggactcctggtcactctgagacaggctgttcccaattgtctccatgacaggcccatgaaaaccaaggctggctattctggacttagtggggttgatggggattgcaggtggtgtgtgtaacacaggcagcctcactacatggtgcgtgtgattttggggtgctggtaaccctttctgattcccctcagacactttcctctctctcttcttctactgctcccacatcattctcagtaattcccttttccccttcagcctctccatcattcaaaccacaggctgaagctaattggcccaggaacaaaaagaacactacaagaacagatagcaacattcttagctttgacaccccagatagtcttggaagtctgggttttggaatacaagggccagatggattttttttaagttctccaaaggttgactttggaaccaggcactagaccttggaaaacttagagcataaagatttggaaagaagatatgatgttgtaacagcagttttctcaacaaatagaagataagaatcctaccatggggatgggaggaaggtggataaaatttggcaaggagagaaggatgtatggggcccatgcccagccatctccgtgaagttggagacctggtggggcaggagatacgagcccatgggtgagtttggggatcacaacgcagaagagatctgcacctcatttgttcatacgtggcccagagagctcgtaaaccagttagtgagccccactcctagtactgaaagttggagtgacaggtggggtgtgcaccagcagaggtgtgtggtttggacaagcagccaggccatgctgcggcctaagcagcagacagagccgggagactgaggtcatcaaggtataacctgaggccatcaagttacacctcagtggagttcacagaagttgagacctcaggccagaagcctgcttcctctctccacctgacaccataaggctatgtcagccttccccaaacccacttgctgtctgcaagaaggaaggtaggagatgctgagggtggggcatcctgaaaccttgacctgtgtgggtggtggcttcaaaatcagatgtgaaccacacgtgactgagggaaccttaaactggcaagttgttctgctactccctagatatgggggcttgtgagctaagtggagttcaggtctaaagaaacgaggttctacctctggatgttttgaggtttgtgtttgtgagattcctatctgcaatccctcacaaattgtctcaacaggcagaagagcctatcattttatgataagaaacgagcctcaatgtttgacaagcaaggagccctccagaatccccatgctgcattccttggtgcaggctttaataggaggaggtgacggcagaagaacagggtaagaggggagggctgggctggggaaaggggtgggtgtggttcaccattttgcccagggccggctgaccctgagaagaaggttttgggtggtgttcctagagggctgccatgacaaagtactacaacctgggtggctttaacaacaaacattcattctttcagttctggaggccagaagccccaaatcaaggtgtctgcagggccacactccctctgaaggctccagggaagaatccactccatgcctttgtctgagcttctcactggccagcaacccttggcattccttgatgtgtctacagacccatcactccaatctctgccaccatcttcacatggtcttcctctctcatggccatcccattgtctcctcttttaagcacaccagtcatactggattaacattcaccctaatgacctcatcttaacttggttacatctgcacaaaccctatttccaggtaaagccacatgcataggtaccaggcattaggccttgagtatgtctttttgagggacacaattcaactcagtgagctagcctgcacaaattcattttttttcttcctatttctggatgctgggtttagataaatcagcctgaaaaatttatatacttccatattagtcttctcatactgctaataaagacatacccgaaactgggtaatttataaaggaaagagctttaattgactcacagttcagcatggctgaggaggcctcagaaaacttacaattatagcagaagaggaagcaagcacatccttcttcacacggcaacaggagggagaagtgccaagcaaagggggaaaagccccttataaaaccatcagatctcatgagaactccctcactatcatgagaatagcatgatggtaactgcccccatgattcaattacttcccaccaggtccctcccatgactagtggggattacggggactacaattcgaggtgagatttgggtgggaacacagccaaatcacatcaacttctcaaaagagttttacagtcaattcacatttctaagtaaaagagcttaagacctattttaacctacgacataaaagacttctgctttcgtggcctcctgttgccctggaagacactcctgcaagaaggctgacctgccttcagctgcatgtctgtacagcaaacccactcaaggtttgacacaaaccttctatgtgtgaaacacatgctgagatttctgatttctgagagttgaaaagaaccatgcaattgtaaatcatgtacaaaggaataaaacatggcggctctgtgtgtcaaaaggttttcccctgcaagtcccacagacatggggagtgcatcacatcggtacaattcaggagaacactgcctctgactctgcccgcctcccccgcatccaagcaagcagccaacaaacaaaacaagccccagtgaagctgtagcctactgtgggtttccaaaaacctttacagaatcgaatctggcaagatggcacatgggggcaaccttaataaaaatctttcctgtaaaatattgcgcattgaaagtcaggttataaattctggaaatttctccctaaagttaaacacaagggatcctgagggtttactctgatctcctgaatctaactgtacgatgctcacctacctatctcagaaaggtgagtgacagaaggactgggaagcagggaaggcataggggacgggctttcctccttgctttcataggatactttcacaggtgggcctctcagctgtgtgctggatggatgaaaggtgagcaggttttgcaaaggcaggttaggggaaccacacacagacacacacaggcaaagacacacacacagagacaggtacagacacacataaacatgcacacatagacacagagacagatacgaacacagacacgcatagacaaacacacaggcacacatgcacggacacaggcatgtacactctgcactgtacacgatgtcattttaggtgtagtgagaataattttatatagagatcaaaattttgcctcatatctatgaatggttccgactagctagaaaaccatggatgattaagcactgcttagaaatgtgtccctaaaatctacaaagttaaaaaaatcccttaatatgtattttaatttgtgtaacaggggatttatgaattgagtacttgtaggctgtttgggtgagaacatttccaggctttcttagacccagctgaacctagggggcccaggttgcaagtgtttgaactaccagataccaagccctctcagtgaccccctcatatataaattttaaaggcttgaatatccaagtgccaaagtcgatcatttgagataagggcctcagctctgcatttcactctttcttcttgcagctgctgttcctgttggaggtagcaaggacattggtgctgatgctggcggcagttgtggtggtgctgggctgggtgtgggttgatggtctcaagtgtgggatggggaaggggtgtgggatggtgggggtggagacacgcatcacatgactctcagatgattcttggcaataagaagacaaagattttcatgttgggagcttaaacactgaagaatttgcaggtatctttttaaagcattcttgtgattcttctttaaatcaatggttctcaaccctggctgcctgctacaaccatgtgggagcttttgaaacataccagtgcagagactgttccccattgtaattctgatttaatcagtctagggttttagagtgaggagctcttcaggagatgcaaatgtgcagacagggcgttgaatcatttcaggtcaaatggggcatcccaatacagcagtaagagtgagagggagccctgggcacagccatttcttctgcaggaacagcactgatgtggtcctggctgatcgtaaagtcacctacctcagtttttaatagttattacaaaatatttcaagcattcaggaaattatatggaatttctatgctctgacctccaggtttaatgactgttagtatctggctatatttcttgtttattagtttagaaaatacagctgtaaaaaaatctggtggctctgactgggttgggaaatttgggatacctttgggcaaaatgtattgagaagacaggctgctcacttaggtccctgctgggtcatttgcactttagtataagtgaggcaacagggtgaaggcaatggtagagacttaaggttgggcaaagatggggaggcaagttgggaaaaggggtgcagaatgggcatagggcttaggatgtctatggcaaccccaggttgtccactgttgaccctggcaatgaggtaaaatcttttcactgaggagtttttaagaagaaatcactatacaggagagtgagaagtcccagttttagcattctttgtccccatatggcttctttcatagttttttttttttttttgagatggagtcttgctctgtcacccaggctggaatgcagtggtgtgatctcggctcagtgcaagctccacctcccgggttcacactgttctcctgcctcagcctcccgagtagctgggactacaggcgcccgccacccaggccagctaattttttttgtatttttagtagagacggggtttcaccatgttagccaggatggtctcgatctcctaaccttgtgatccgcctgccttggcctcccaaagtgctgggattacagccttgagccaccgcacccggccggtttctttcatagtcttatgttacattcctgggtacccttttgaatgttcccctatttttttctttttttggagatggagtctcacgccatctcccaggctggagtacagtggtgtgatcgcggatcactgcaatctctgccacctgtgtccaagcaattctcctgcctcagcctcccaagtagctgggattacaggcacctgccaccgtgcccagctaatttttgtatttttagtacagatggggtttcactatcttggccaggctggtcttgaactcctgaccttgtgatccacctgccttggcctcccaaagtgctgggattacaggtgtgagccaccgtgcccagcctgttccccctattttctagggaaatgttgacttctttggtccataccttcttgcaacagcactcggctccagcactgtgtgtataaatggcagcctgtgccctctctcacctacggctggagaagcctttttttttttttttcctctgcctttccttatttggagttgatgctttttgacatttctgtccaacaaatactaccttgggttctggattatattctacggaagcagctgacatttctttgatccttccatttgaaaatatttattttaaaaagattgagaaaggtagaattgacttctaaaatacttcaataaataaccactttcaagttgccatgattcactttggcagagagatgctatagacagataacccagagcaatgtcaaaaatagacacaaacgaaccctgctcaattctggcctcttcctttctctttcttttcactgattctattcaacatcctgccttctgcaatcttaacatgatctgttaaattatggtataatcaaaaccctgtcaccctccatcacttataacttcaggaagccttataattcttgcttaaccattcaacaaaacaaacatatcaggggatggtctagcaagcttagttctagaagcttatttatccttctttgatatctgtctaaactcatacaaaggaacacaagtcacttagcagatatgtggaagttaggtacagccttgcaacatcacaatcaccagggagcttgctggaaaatgcagaatcccaggccccacccccgatctactgaaccaggatctgcattttaacaagagccccagataactgctgtgcacattgaggtttgagaaacactaacttacagcataaaaatcaacacttggctgggtgtggtggctcacgcctgtaatcccagcactttgggaggccgaggcaggtgaatcacaaggtgaggagttcaagaccagcctggccaagatagtgaaaccctgtctctactaaaaatacaaaaaaattagctgggtatggtggtgggtgcctgtaatcccagctacttgggaggctgaggcagagaactgcttgaacccgggaggcggaggttgcaatgagctgagttcgtgccactgcactccagcctgggcgacagtgagattccatctcaaaaaaaagaaaaaaaaaatcaacattgtaccactcagctccctcatgcagcattaacttacctgcctagaaaatgtggctttactacttttgacgctgcttttaggtcccctctaggtgaggcagttttagggaaaaaaagcaccaatgatacaagcattttcttcaaatttcttttgttaatgtgagagtgataattacagtctcaccagtttttttttaaagaatctagagatgtccactttattttaaaattatgttcacagtgtcatattttctattttcctcttcttcagagatgggatcttgctatgttgcccagattggtctcaaactcctaggttcaaatgatcctctggcttcagcctcctgagtagctgacattacagatgcaagtcattgtgcccagctccatattttccattttctaactaaaatgacatatgctaagcaggggagagaaatacacagaacttccaagctatagcagttcagcttctttctaaaacccaaataatagccctgggatttagagatgagcaggagaagggcttttcttaaggattcaggaggcaacacggctttgtccttaaagaccttaatgatcatgccttatcttgccaactttagctgcctagaaatgtgaagggcttagaaacagccagggctgagtggggtgcagctagcttcaatatgaccccattagtagcacctttggaggtgtctgctcctagtgggagaagtatgaccagacttttgaatagaaccagctttgtttctggctgaagatgacatccttgctttagtaaatcctcctctccatgatccaacatttctctccttgacccatccccatttctagctaccttcactgaccccatagaggtcattctttggaagcacctgaaataaaagatgcacagccctttcctcctctgtccctcccacctggtgaaagaggcagactttcccattaacctgccctcagggtgaagtacattgtcctgattacttcagtaaagaggaacattggaatgaaggtaccccaatcagggaggctgtgtgatgaagacaaagggcttcagagccatctccctccctctcctgccctgacagtggtgccccattccccatttttaaaagttggaaatctgaggcaaagccttattgtaaaatgttgcagtttctcaggtattcccagggtgaaatctcacccctaaaatcagaaactttctcacaagtctgataaatgcctgcaggctcattgtattacgccgttcttggactgctataaagaaatgcctgagactgggtactttataaagaaaagagttttaaggggctcacggttctgcaggctgcacaggaagaatgatgctggcatttgcggcctctggggaggcctcaggaaacttacaatcatgtcggaaggaagaggtgagaagcaggcacgtcacatgacaagagcaggaggaagagacagagggggaggtgccacacacctttaaacaacccgatctcgtaagaactcactcactatggcgaggatagtgcatggatggtgttaaacaacttatgagaaattcgtctccataatcctatcacctccttccaggccccaactccattattaggattacaactcaacatgagatctgggcagggacagagacctaaactgtatcacccatgctaactgctgaggcttctgaagcccttcgtagggtgccagaagccacctgtctggtcatcgtgcacacacctgtttccacctgagatgaccaggctgatgtggggctgactgcttctcacctgcctggcatggggttcggctgtgtctttgctagtggtgcctggaacattacgggcacggaacatgcattttcttgtgggccgtgaaggtgcagaggccacttttcttgggtctccaggtgaaccttgggactgtgttaccactaggagggcagagctgtcacccccgattcctgggggagactcaagggtggcacgtgggcttggggatgaacaaactcatggaagccttgtaggaacactcagggtttctctggcaggagccagtgtctgtcagaggaagagacaagctgacagcctttgacagagaagacacccgggccccagaggcagcggaggaccccaggctgacagacacacctccaccaaaaacagaggcaagctgacagtgcctggagctcacggtttgcttcagaaaaggcacctgagcttcaaaaaggaaaagaagaaatgagtgcccacagccaggctgctgggaattcatccaggagctgtggcactgctggggagggccagaagccggggctcctgccagagccaggagggcagctggtagctggttcgtgtgggaggctgagctttgcctgtaggaacaaacactgtggctgctcttgctaaggtatttaaacagcatctcaatgctgggctgacagtttttgggtataactgggttctctccattctacaaggccactttggcttctaagaaggcagctctaaaaagaagtcccctctcctattaccttacagaacccccattggtgcgtggactcctccccttgcttagtgtgggagccccacccaaggtgcagcccagcagggagacagaacagtgttgttcagtcctggctggaaggtgtgtgcacagtgacccccgatgacagccaaatccatccaggtacagcaatggcaatgagcagagggagcctcagcccaaagcttcccatgctgggagaaatgacccaccacacaacactttctttctagaagcaaagttgtctgttccactgccttgtctaaaatcttgctttagctgctgactggctctgagaggccacctatggtcctgatcctggtgctctccgtgccctgtggcctgtccccatttccccaaagcagacctttcttcacactctctccctgggattgtactccattgtcacactgccctctagtccctcacttttctaagcctctgtccccagggctacctcggatttcctgcatccatcagggaagtctctgcctttgaagtcctggctcaaccaggggtccgtgcagactggacaatcgcatgtgtccatctcagggacaggcttatcatcacagccattgtattctgtaccacctgttagtataaaaagtcttttgcatctgttttcccaaagttgccacagcacttaagacccagtgggatccaacccctatttgctacgggagtaaaaattaagtgagatgggaaatcactcctgagttggagatcatgagaaagaagaagggaagattcctattaaatgactgttattcaagtgaaccttggacattgggctgtgtgtgctcactactgtgggttctccatgttgaccgccctttaaaaccatctgggaggctcgatgaagtatccgtgtgggaaggggaaggcagagcgtgatgggggccaccacacatggtgtgtctgagcagctttggttgctgacgctagcctggcatctgtggaatctgatttgtacatttgagtggccatgaaatgggctctagtgcccttaccggtcatggaaagttctattccaggtaggccactgcagagtgtctgtcaaggattgttcccattggatttcatttcttttaaatttcaaaaatgccagtattgggaggccaaggtggctagatcacgaggtcaggagatcgagaccagcctggctaacatggtgacatcccatctctactaaaaatacaaaattagccaggcatggtggcacatgcctatagtcctagctatctgggaggctgaggcagaagaatagctagaacccaggaggcgaaggttgcagtgagccaagatcacgctactggactccagcctggctgacagagcaaagactccatctcaaaagaaaaaaaaaaaaaagaaaaaaagaaaaagaaaaagtcagtaatgtgttactgttctattattgccctagaaaggctgtaggtggtgggtggagttgcagaccaggctccacagatgttatgcatcctgggcaataagacatcttccctttcagcctcagtatttccatctgcaggtaatatcaaagcactggatacagaggtattagaagaactgaattgttataatatttgtgaaattgtactttttaaaagggaggcatagccagggaaaaacatttcctttttcattagtttaggtgtaatttacagttgtttatgatgatgaccctctctttgctatatttctttgttgaagctttgaatacagaaaaaagttttaaatatcctgctttaacaagaaaatattatccaatgttttaaaataagaaaggttaaaaagaacttacatagtaaaaatgcaaatatttccctccttctgttaagaagtaaaggctttcaaccctttaataagtatacttttctcaagttttcagggggcaaaacagctaagaaagggagagacggctccgtctgttgagaaatgtgattttgagtttctcctgggtaaaggtggaagaacagtgagaggaagagatttttgtcttttgtgtataatctcggtagaaatcatgacatcgctttaatgatattcttgcacatgtgaaactaataatagtttgtgagcccagagggaaaaaccagttttgccctgaaatacagccaagttggactagaaaagcgattgttaaggaaactgtccttagctggattgtcctcttctcgttctctctcactccccctcactctgcttctttctctctctttctccagctctcttgtctcaccctcaagtctaaaaattataacagcatttcaagaagctaatacactaccacacttttgctgacactcttaaaatctcttgtaaagaacacaccttggaccctcacagccagtgaatgttaattgaagagtggaccttggtagtgtctgggagaatgctgaaaaagaccagaggtgggaagagttcaaggccagatgtccaaaatgcagggccagagtctcctgaccctgatcacaaatcctagctacctggtacaacctaaccttgtgaacttggcttccagttccctacctacaaaatgggaaaacagtaagttcccttccttcctgggcgcttgtgagaaccaactggcttaatgactgggacattattgctgaaagctagtagcatatgagttccactatgcaaaggtgtttgcttggtgtctgatgttaattcctcctttacaactcgcccagttcgtgtggctgggaggctcaggttgggcacaggttctggcagctgagaatgacctgtccagcttctttgaatgttttcatgtcaaatcagattgcttctgtggtcaatggatgagggattacagattgttctttcactaggaaatgttagaatgtaaataggcacagcctttttgaagggcaatttagtgaaatgtaacaaaagctttcaaaaaagtgcctaccctttttacccagcaattatatgtataatgctttatactaaaaaggcattctgatatagtgtgtagaaagacacagtgtgtgggagatgcttatacagcactgtttacaacaacaaaaaaagggaaaacaacccaaatgtccaaaatataggatgctataaatccacaggaagtatgttttagaatcactcacaatgcagccaccacaatgatagtctatgtttcgttgaccatatcgagtacctactatgtgcaggacatcaactagggaaacatcagtgaacaaaacgaacaaaagaactctacccctaggagcttgccttctattgcaggagacagaaaataaacaaagccacatgcaatttgcgtggcgtgttagaaggtaacgcatactatggaggaagtttaatcgggaaggaggaggtggcagcagaggtgaaggatgggtgccagcacaaacttaaaggaggtgggaatgaaggcgcttgctgagaaggggcaattctgggtggatttgatgggagaaaggcaaatctggggaaaggacatccaaggcagcagaaggagtgagttaggaggcctggacatatggagcaagtatccatcatgttagagaaacagcatgaggccatcagcaaggtgcgtgaagagcagggagtgagacccacagtaaaagacaatgagcccaaagaaatctgcaaaccactcctcattcctgacttggagagaagttgatgatgaattatcaaataacaatatcagtcaacaatatatgatccaattttagttataaaacataaaacatagtaaaccctcctatttacagtctgtgctatattctcccccacttctgcctcccccttccttctctccttcctgcctttctttgttcaaaaatttagcttatctgaatgttcacatttttctacagtgaacatacttgtgcaacaaacaaataagaaaggctcaggtaaaataaattgacagtattttattgtctttggtcaagctgtttgagcacagaattcaccaatgttaaaatgtgtttacttttctgaattagcaataaacactatttgctttgtagaaaggttaaaacagtggaagagctcaaattgggaagttactttaaaggtgagtgttgtcttagagaaagagtaggttggtttccacaagttaggctatacccaaaatacactttctctgcatttctatcggtgaaatttccccagggtgaatctgaaaagtgccagtgtatggaaaccacatggaaatagagggataaaggtagagagctcctccacccccacacatgtatctacagacatgttcaaactcatctgtaatcataagagcattgaccttgactttaccgtaaaactttgatgattgagaatgcttcaggactggagtgttccagtttaatttgaattatttggataattgactcaaccaggaataaacagacgttcaagttaggatttcaaattcagttgttaaaaatctttctaaaaagtgagctcccttctctatgttggtaagtgtgctgtgctggacacagttcagtctttgatgatgtgggtgccctgggatgtaactgggtcattattctagtcttaaactcatttatttctcctttaaagtcctagaagagtagtgtaagtagcatatctgccttctgaagtaacacatatgcttggcattaaaaattataaaatcattaaattgtttattacagtttttcatatcctcttagaagcaggggacaggaaaaccagctaactaatttgttttttttaattatcccaattttgtagctagaaaacctgatatagagagaagtaaaataactcatctaatagagctcagtgtctgtcaaagctcatcccatagaaccacatgactccaggttaactccaatctctcaggctcctagaaaggaaatatgattatgcccaagggcatgaggacttaggttctgaagatctttaaggcaacccagaagaacaatgtcaatacaggaagaccagaaatcagtgacctggactgtgcttcaatttttatatggcttagagaagtgaatgttacttcccttgtcccatctgaaacacaaatttattccttctcctccatcgtttaaatatcacatctgagtgacatctagaatggatgtttttgccagtacaagttactaagaaaagaagaaagctctttcccatgtgacatctcccctctgacctacataacagtattttggtgttttatttcttgtacagtgggtcctcacagcattcatagaaatggctacaatgtgcctacatggaataatagattctgtattatttttccaaagataactattttcaatagttttaatagtttctggtagttctcagtacactttaaggattatagaaatattattcaaatatcatatattgaatggcccttccatgaaaacataggggatacaataatgtgtagtctgaccctcgttggcaaagaagtttgcatctggcagagagaagaagtgtgcaggaaggcaccggcctacagggtggctgcagaagaaaccccacagacagtgcccatggtgagaagataaaagctcaagcctgagaacatgactttgcattttggtggcattttcaaatatacttttaattgacatctcaaattcaatgacctggacatctaactcaagaagccacctagtttattgttttgatttctctgacatgacagcatataaattacccttccttccttttaaaacaatgccagggtgtgagaacctctgttttcagcaagtccctcttgcacatatcttaagcccattttttttcctctctctttattagaaacaattgtcccttcctctccatgctgtctgcgatttgttctcaggggctaagagcttcagtgttcctactcagtgttttctctttctttgccaactcagtgagacccctcttgccttttctcatgatatgatttggctgtatccccacccaaatcccaccttgaattgtaataatccccatgtgtcaagggtggggccaggtggagataactgaatcatgggggtagtttctccctactgtctcatggtagtgaataagtctcatgagatctgatggttttataaagaggcattcccccgcacaagctctcttgcctgtcaccatgtaagatgtgcctttgctcttctttcatcttccaccatgattgtgaggcctccccagccatatgcaactgtgagtccactaaacctctttcctttataaatcacccagtctcaggtatgtctttgttagcagcatgagaatggactaatatgtaatgcaattggccatcttatggaatcttagggtgctttaaggggacagagtgattggatctgttttgtggttggaatatgaagcacagatgactcaatcagattaccggtgtctgaaatgacatgggaagaagccaggacagacacacagggctcctcactctatttatcactctccatgtataagtcttgccttattttagcaatatcaatagttcctctggaaattaaaaacaaaacaaaacaaaacaaaaaaaaacgaagaagcaacttgagtccagattctttacctgaagaaagaaatgaactgcaacaatacttgtacattgcaagggctcaagtagtcaaatgaggttatgatttttcaccaggacacccagggtctgtctttagtgctaacagcctcctgacacctattttgtaataaaaggacaatttactttatattggtagagagtaaccaaaaaacatccagatattgttgagtaactgatcattttaagaaaaccttattaatgcaatgaaaatattgtgggtttatttgaaaatggctggtggggtttaattaaattctcctatcccacaacagttttttgtgttgctgaaaccacaatgtgatcctttctattagctgctctaaagtccaggtttcacactttttgtgggtgggctattgtgaatgactttggtattgtttgggtgatttataacccaaggattttcaggtgaaatataccttctgatgctggatcccatgttctagctattatcccagtggccaagataaccactttgtacttcccatgagagctgaatctcacaaaagactcagccttgctaacttaaaataaactccacttatgcacacgacaggaatagagaagactatctcagtggtgcaagccaaataaacaatttccctgaaaaataaaattcattgacagcaaagtatttttgttcatttttttttggtatcactttggggtcttgaaaaaaaattatcttcacttacttagaagttctatactgacccacacttatcactatactgaagtagtgggctgtgccataaaggttaagttccacataaaccccattttatttttttactatagactccttgttttcatggggtctccattcatgctgtttgggagccaggctaaattcccagtgacttctatcaaagcataagtgagttttacttcatgggcagagagaaggtttgtagtttgacagatatggctgaatgactaggagatgaacatcaagcaacattgtttttgcacaggagaaaaaaaggagtcttgtctactctctgctccagatcacaaaataaaatggtctcatcatattcaggatgaacaagtttcccattcacagcaaatccccaaaaacatgctcttaaactctgccagccaaaaccttgcacatgaaagtgacaagacaccacagcccctatctggctgctgcagcagctcacctagctctctgcccagcaccgctatttattcactggaacaacctcaacactctgcgcctggactgcagccacgtgcgctccctctggcccatgcagtgtggtgtgagagctttctttgggtggaatccatcatcagcctgctctcttggctcatgagtgattatctgctctcagcaccactgatgacactaaagcaggtccatttttctattactcatttactgcttcacacatgcttagggcttcttgccttctgatcagtgtcctagctgtgtgtcctaatcccagtatttaactctgtcttgctcatgactgccagattaaaattcctgtatttcctcccacttgcccccaatcaaagcagtcacttttccaagagctatgagctcatgtaccatgccgatgcgtggcgctctgatttccatggtgtggtagaccatacccctgcctgatcaatcctcattgccaatacaccctatatatatgtaatggcaaaaccgcaattacttttgcaccaacctataggtgggttcctcataggaaagccctctttctcctgggaaaaccttactaagcaccaaaacgctactgttcttccaagactccttcacatttccccacatccctggatgttttctgcagataccagcccttattaatgttctcctccctcacttaaactctagcaccattctcttgtgtaatgctatgcttctttgtgtacattattgtttcatcaatactctcattttctaagtttaaggcctctgggaactgaagtcagggcatttttttctctatgtccccttgtcttctttaggtagtaggtacttagcagagatttgtcaactgactaacccaagaagctaagacaattctggacatagctatgaagcgccaatttctggcaatatgaaggtggtcaggagatgtttagaatgaaagtaaatgttatatagttataactcttcctcacttgactgcatgaaggtctgctgtgataagccctctattcaattttcttaatatggcttttctcaagagtacaacattcttattcactgatagcatcttttatttaaaggataataaatgagactattaattttgaaaagaacaaataaacttcaggatggattaactataattccaaaatactaagcagtttatttaaataacctgcataacagagaagcccttgctttgtgctcataatctttgcaacttagtgtgatcatgagtattttttctgatggaccaaaagctttttgtttttgctgtttttcccccctagacactgagtccaggttaaatctgcctctgcagtgggcattctggcattccatttctagttgtgaccctacctggctcttgcatgagcctggacttggaggtctctatcgtgggaagaaggctgtgagaaggggcattgtgtctgggttcctccttaaagcagatctgaggaaaacctaagccagtagctcccaccctttagagtgcatcagaatccctggaggggatgggcagatgattggccctgtcctcagggttcctgatccagtagatcggggggtgagcttgagaatttgcatttgtagccagctccctggtgatgctgctgctggttcagggacacactatgggaaccactgacctcagctgactttcatcagctctgatgcctccttttgtccacagagacccccaacagtggccagtcaaggagacatgtggagtgtgggcttgggcccaacactccttgagtgctgattaaaaaagagggccacctaatgcggcctctcttccaatgacaacacataatgtcataggttctttatttgccgtcctctttctgccctctctttatatgctttactactgtgggcccagccaccccaggagggctaatgaaaatttaagagggtgaatatgtttagggtattgactggtgagaccttgggagacagctgaagaggaaggaatctaccccattcgttgccattattgaaactagatttcttgagaggaggaattatatgttagtagcactatattttgcacgttagagatgtctaaaaatctgaagtgtgctctgcctaactcgtcatggagtcttggctctgaaaatgttgtaaggtgatgcaaaaacctccgaagagagatttcattccttgtcttttgactgaaggtagtgtgttgacaacaaaaagcaagggtaaagcttttccatgagcagtgagtcctgtacccttcctcttagtcatgtgatgctgcttagtcatatgattactgcattccagacctgctctcatagacacaaggttcgtgtagggactgagatatcatttttggttaaatgtgattcattttttttatagagaaatgatggctccctcagtcataaagcaatggccccatagagtggtgaggtccagtctgatttgttgactgagcctgaagggcatcgcttctctcatagccattagaagtgctctgtgttgcagagactttgaaatacatacactccaaccccagttcctagctctctcagcttctttatgcttctagtgacaaagaattcagagctgtgtaaatgcagagaagacagatcacattacctctgccccgctctgactactgaaaatgctttcttatattgaaccaaaatatgtcactttgtagcttccactgctgggtcccacttttatcccttagagcccagcagaacaattataatccttccttcatcttcaaatatcaagatacctgaaaacaactatcatgcctcctcccccacatattctccagggaaaacactcctaattctttcatctactctaatattacatggtttggactcaggtactgtcctgcctattcccttctgcacatagattgttggattatatcccttttaaattgaaatgattgaatgtggcagtgaaataaatcctgtcctcaaaaacattctcttcattaaacagaagttccactatgagacattatttactttggaatggcaagatatttgaagaggtcaagagttttctaatccagtattactgccccatggaaggattaacatgcattactggtatttactgtttcattttgataatgttttcccctgcatgaatgtatgtggctgtgatatctgagttagggaaatggaaacgatgtaagagaaccggaagtattatggatcaccactctgtttcttctggttcttcctctcatagtcttctcagatatttctccctgacatttctcttttctaggttgtaagtttggcattaaagctgttcttttgcttctagtgaaaaggtatggaacttagtttccaagttttctccttgagggaagcagaggttctcaaacactgcttacaaattacatggtctattttcaggaaaacaatgactattagtagactaattcaacctaaacttacagcatgtatctagcctatggacatttaggggatttaaaacaaaatgcaaattgctagtcaacagcaagtgccagatattagaagacagcatctaattcttcagcattcttagacacaatgtgggtgtaattgtcaagattagaacattgcttttgagcatgggttgtgaagttggcttttctcctttgtgtctactttaacagatcagctaacagaaatcaaacaatatgtatttgcatctcttttgttaagaatcatctacacctactccaaaagtcaacatatcccaactaatttattttaaaaaaatacaccactaaagaatgattcaagggcaccaggaaatattgtctctaccaggaatcttttcaccactgggacaaatcatttcctctgccttactctatcctgattcacattagctgtatttctttgctgccagacatttatatcgggcatgcataccaaagactccagtgtgttcaccctaccagtttccctcctcctggatatagagctgaactacaatttgcagctgctcttgcagttaggtatgaccatagaatatgaataggagtgatatacattacttctaggcccggatcattaaaatcttctacataatcatctactctccctctttccttgtctgctagttggatatcaccactcagcagatcttagaagccatgtactaaagatgacaaagtgtccctcagcctgggtccttgtacggcatcaaccaattagatttatgtgaaagaaatcttctattttgttaaattagtgagatttagatattttctgtttcaagaactttctaattaatacagtatacacaggctcatcaagaactgaagttaatgccacattgcaataaatgaataaaaacatctgctatttttaaagtgcctactttgtgctggacactgcacaaagaactttttttttttttttggagacagagtctccctctcacccaggctggagtgcagtggtgtgatctcagctcactgcaacatctgcctcctgggttcaagcaattcttgtgcctcagcctcctgagtagctgggactacaggcatgtgcctccacacctggctgatttttgtatttttagtagagatggggttttgccactttggccaggctggtctcaagtcatctcctggcctcaagggatccacctgactcggcctcctaaagtgctgggattataggtgtaagccaccgctcctggcctgtgctaagaactttacttacattatcacatgaatcctcataacatctctgaggtatatgttgttattattactcttattgttattattttatgatagggaaagcaaggcataaagttgattaaggtcacatagttagcatagtggattatattattgcctccaattattctcttccctctctgaaagattagatgtctctacctgttgctgcacggcttgcagtgcttcactgtgggagaaatatacatctccttcccattgatcattgacactgatgtgacatgtgaattgtccggtcaatggaatgtgagtggataacttgtgccatgtctgagcagaaatgttaagggccattgcttaacttgggagtctccttttcctctgatactgggatagagtgttccagaccaattcttgatcttgaattccagaatgaagtcacaggagcagagccacagctgaccagcagaggcatagcgctccagagaataatacgcctttgttttgtaagccactgagatgctggggttgctgttactgccccaaacttggcaaaaatggacagatacacctagaccttgatgcagattcagttagtaagaaacaccggagcctgtgctcttaatcacggagcaacaccgcctaccaagcacattgtcaaacttgcacaagttcctgctagatgatacaagagaaatttaaagcatcatgaaaaaaatcaattcttatcctggataagaaaaaagtagatgtctgtaagtttaaagaggaaactgccacaggatttaaacttaatttatagatatgtctctcacattgcatataataccttcagatttagtcccacagaacagttgttggcaaggacatggatctttttagccacagatgcactttctggttccttttgtaaggatttcatgtcggaaaccacatctctgtgactgggaataagaccggtgatacatgttagccaaaatctattcactaaaagaatcaccagtactgtatgattcctggtcctaagcacagccatacagaaaaaatgagaagcatgagactcaaggagataatgggtttaatctgacttggatacatttgtatagacataaattagtcacttggttaaaatttagggttaactttacacattgtaattgggaaaattgattgatggccttactgcattccatataaaatcagatctgaatgaccatttgaacattgcacactgcacaaaatcattctctgaggttttgtttaaacaatgattcaatttagtaacaaataaataaatgaatatttacaactgattagcaggtatgattagatcaaagctatagtttagagaggatacagactcttcttttaatgatgagaccgctctttgaggaaaataatttcactattatttaatgttattaaaatgatagcaagtatatgtatattctagtactttgccagaggaaattcagaataccattagagcactaactgcaattgtgattatctcttctttttattggagcctaattatttctagaaataattatttaaaatgcacttcaaaatgtatttttatcctaaacagctacattttattcttctatctctccaaatactttcactaaaattaaaaagaaaactaactcaacaaaagtgttttgatgatttttcaacttaactgccaatttcccccttactggtattaccaaagttaataattttgtaaaactccagagtgaatcaattatcttttggtacttaaatgccaattattgaagataaaatgaagaaacaagaaatgccatctcaataagctataaatccaaattcactgaatttaaacatcttaattccaccaaacttaaagttctaatacaatgaacttagaaaaaccaacctcactttgaaaagtattgtcagtttaaagctggtagcaataagtaactgccttttcccctcactttcttctttcctcctactctgcctatttctggtccatttccatttccatattacttacatatcatttgataaaggaagaactggtgaaaaagagaagagcttcaccttatctgcctgcctttccataaagagcatttatcttgttttcattaaggtttacatggtcaacattaaacccttgagaacagcaacattttctacctgtgaaaatcagtgaatggggttaagattccataagggtattttatttttaatctccaatgaattttttctataacttcttaaataactattctaatttttttccctataaagtagaggtagactgagatgatagggaggaatatgagactgagttaaaagcccttctatattctcaaggaaaatagttcatgtaagtcctatgtattaaataaagacctgtctcacacaaaggaaaacatactaatgtttaggcaatatctagatgaggtaactattgtttaggcaatacctagaagaggtatcaaaatgattttttaaaatagcaaaatggaaccaagtgaatgggggcgaattttcacaagttgctctccttaacaaatcttacttgaaatgagtaaaccaattattttggagtatgctattgactgaaaagggcatagtgacactttgttaatcaattagccacctaggaagaaagcaagtcatagttcggtgaataagcactgaatatgtgagcatggaaactaccagaagtaaagattattgactgaacaatttcatatacctagattattgacaccacccccctttttaatttattagagaaattgaactttagaactcagaaatacattactttgtttatctaacagtctatattctcgtatagcttcatcctcataatgaacgtctacttcccttctgctgataatgtcagatggaacaaggccaaggaacagctgcgttgtttaatactccacgtgtcacttcttctgtctactttaggtagcaaccttttcataaactaaattatggataaacttgtcaatacctatcaggaactgaaatgtaagaaatagtgtaataactcatccttttgcttaggtttgaaatagattgctctgtcttcactagcaatcatttgaaaagactggaaggtagaaacacactgctttaaccacatcctgagtgctcagcatgcaatatctttagaaacaacatgtcacacttggaaagcccagcaaggaaaaccaggatcatatcttgtttaccattaaaaataacaaaccagaaccagctcaagacctcatgcacaagtgcatccacaaaacaggaaagcagccagggatattgttgaagctttatcaacatttccaaccagttgccaaaccttgactgggctctgcaattcaaagtataccttgtaacacctggatggcactctgacaggcattctatttcaaatatgactgtcaccttcctgtattatttttcctcttcatatcagtgacagttgtggtggtgggggacctactaccaaggatgagagcagggcaaagaccagcttctcgtaaagtgagagcagaagggcttgatggacttacctgttttccctgtatgaatgttgaaatggaacttgaatggtaataaatcctcccctcctgcagtttcttccttgtttgtattaagagaagtgactcctctcggtttcctacgactgcaacctaggaaatgtagccaccttgctcacacgcaggcttgaagatgtgatcactggctctcatcttgctaacaaactctctctccttttcggaagctcaccagtgttgttttgattccttccagttctagaccgagaggaaactatatctccaccctcttcagtcctaggacccttagaaagaatttggctgggccggatacggtggctcacgcctgtaatcccagcactctgggaggctgaggcaggcggatcacaacgtcatgagttcgagaccagcctgaccaacatggtgaaaccccgtctctactaaaaatacaaaaattagccaggtgttgtggtgtgcgcctgtaatcccagctactcaggaggctgaggtaggagaatcgcttgaaaccgggacgcagaggttgcagtgagccgagatcgagccactgcactctagcctgggtgacacagcgagactccgtctaaaaaagaaagaaagaaataacaaacttggttggctggcctctcgctgaccagggtgcttccacagctcccttctgccatctatgcccaacaaaaagttaaagagaagagcgtgagagggcaagggatgcatgcttttgaaagccaaagggactcagctgaaactagcaaccctcgtcagaggcggatcggggtgtgtgtgtgtgtgtgtgtgtgtgtgtgtgtgtgtgtgtgtctgtgcgcgcgcgcgtcctttttctccccctgaggacagaatcctgtctccactctcagttcagctcaggtctttccctgtcccagtgttcttgattctgaataggtcctctgatgcaccgccatgcataaaatggatgatttgcaagcttctttgcctcacgtaattccgtgggtaatttgatatccagattctgcacgagccaaagactcatttatttatagaaagtgattgacctccagcgaccaaaggagtgggtactgcttgctgggggctgcagacaggtgaggcttcaccctcggcgcctgggctctggccttggtgctgaatccggaacccgctgaggaaccaccacctcggcggcccccaggcaactttcgggaggtttcaggggcacccggccagctctgggcgccctctcgagcgtcgccgtcagggagttgggcacaaccgatgccctgggacccgccacagggcacgcggctggcgtattcctttgcctggagccgggaaagttttgtccaatttttttcccctataactggagctgcggtctcccctcccacctgggtcgccatggagactcgagctctttttctttctccaggcaaaatgggcgaagctcagttagctcagccctgactgtagcaagcccttttttctccctaagcagttcctgggcatcacccttttccgtttctttttttcagcaaaagaaaggcaggcagggaacagggctagcaggatgtggcattgctccctgtaccgtagggctccccgggaccgacagactttggataacagcagttgggaaacactctaaacatataatacatctccaactcccaaacactggagttgtggggtttttttttttttctcttcctttttttgggggttggaggcggaattctttggaaaattctggtattttgtttctccactaacctcaccctctgtggctgtttctattaagatatattttccccctgacaatctctccatattgcacctagtacaacagatgtacctgtggatccactgggcttttattgggttttgggaatactgatgttatttcacttaaaaactaatccaagcttaatgttttgatgaaaatgaaaatatatccacagggaagcaaatatccacagccacccagtcctctaaatgccacacacatctcattttatctaaagtgttttttcttcccttccaattacaaaataattcagtttactcctaggaagatcttcctattcactgtttttagtcatgctagcacatcttcggttttaaggatagagaacagttaggagttacagtattctgtttcccattctccgcatgtttctccccaaccctcacttttcctccctttcgtgttgtctcctctcctctccatgcaaagcagaacaagaagactgccttccacaaagacaataggcttttcccaactgtaaatgactacatcacaagccgcacctgtcagttaatcagtgcatttaagtctttgccagcggatgttgaaatgatgtctgcaataactgactgggtttctgcgagcccagggatgcagacccctccttcccccgccccccgtgcgagtttcagtcgctaatgaaaaccgtatgaaacagattccccttctgttatgtaaccggcttctccctcgcctttcggctgacttgggcacaatgtttctcatgagagtggagatgcctgcggcgacggcggagctggggaaggggacgcggggacccgagagcacggaacgcctcgcccaggtggacgccagctcctcgcctgcgagcagctcagcgcaccgcttacctggctgcggacggggtggcttcactcaatcatgatctcctctcttgaaacggagcaagactgaacaattcactacacgacggatggcgagggaaggaaatgcaaaaaagaaaaggaaaagaaaaaaactggaatcagatggtcaaatttcacatcagcaccgagaggctgttaggagactccattctgctcgcggctgctccggctccaggtccggcttcccggcgtccgcgggtctccacccctccgcccgcccagcctctccagccaggtgcggccgtctccggactggctccctctggccgagcgcggagagcagggctgggcgctggggccaagggaggggcggaggggcgcgcgtttgggcagggacgggggagggagactgggtggaatgaagtggggaaagataagagtggcagaagaaaaaaaaaatccccggttaggagaaaagtggtggaccacgcagagagacgtcatgaaatccgcagattcaatgaatgctactcaattccagccgactggctgagccccgctggcagcgcacgaagcgacgcggctccgagataaaagcgagtgcagcgccgcgtgctggggaaaaagccgcacagcgccggcgcggtccgggaggaaggggcgggggcgagcaggacagagccacagacccagagacgcccaccccgccgcccatgccagctagcgtgtcagcgcgtcgaggaccgggcttggtgggggcgggctgggcacaaaccaacgtgcatcccccgccactggaaacgtgggtgctccatgctgggggaatcttttgggtttcggtccccgaccccccagtcccaacctttctcccagtgccactaagtaagttattcccggagaaacgcctggaaagcaggaaagagccgaagctcggggagcagttttgtctgctggttgtaggggttcggcttttagggttttgtgagataaggaaaaagaggctctgggcactgcctcccaccgggctgaaatccgtgagaggcagccccggcgcgggagccggagcctgcaccgcccagagggggcgcagcgagcggccgggacggaggggaggggccctatccctgagctttgcttgcacctggtggcgccccagcctgctgccccattcagtcccttctgtcctgtccactgcaactgggacctggtcccggctgctgcatcatcaccccatccttatatgatgtctctggggtcactggagacaaagaatggccttttccaagaatgacccaggctgccttcaaagttgaatttgtcaggataagccccttagacaaaggtctactccactctttgaatctaacttgctttgtgctgttattccaggggcccctcatagtgctcccctcttgcaccccctctttttcttatggtcatcaaaaacaatggttctacatttccaaagtcttcccataaattgcttctacctatgaacagaactctcttttatgctgtctttttcctagggatgaatggattgacaaattgtaagagtagcgaataccattggctagtaattttataatggccctttcaataactggctattcttgtgctgctttatgaagtggctttccttccacaaggcacagaatctctacctcaaagaaggtgaccttattttagagagaaggcttacggaaacctcttatttccaagattattttattctacatacatacattttaattacctagcaattcaggtcccctcaagaatgctgtctgccctctaaaaatgactgtaatatggagaggtgtttgtgtcaatttgcatccaaagtcatgtaaaagtcaaccgtacacacggcctgtgagcttgtatttgctgttgattttccctaagaggttgtaatctgacttgctattacttctgagtcatatatcccatatacagaagatatgagtatgtgtaatatctgtagtatgtgtaatacgtgctccacaatgcctgctggatctagtgatagtgttacaaataaacaaagaacaactgaaccaaataatccctgagagaccaggaatacaaatgcaagatgcaggatttcggtggacacagccttagaacattaaaagaacaacccatgttgactatagttgtgtaaagggcattctgtttaatctgtgaagctgctatgggtatgcctgctaattttgatgatatatacttttaccagtagaatgatttcacaaagtatctttcttacaagatattagactaaataagaaagtcaagagttggaagtaacctatttgtctccttcaaatactttgaaaactcccctacttgaaacagctgccggggtgatgtgggcaatagcactttgtgaatggcataagagcacgtgttgaatgagatggatcccattaacacagcctgggatttgataaacaccagagacaagagcaattggcttaactgaattcattcatttattccgtagagttctgataaagtgatctgcatgggtgtaactaagagactgcagccacatctgaaaatcaggcgagctgtgcttcagagctgcaaattgtggctcctctgagctcctgagagcctggtctctcaaactacattgtgtttagcttgtctgaaatctcacttatatatctattttatgatttcaggtgaaggcaaggcctgggggagaagatctttcagggtaaatcagtgctccaaatctcacagtgacttttataattgattgattatgtcatacagatgagactggtttgtctcccacatataaagctgtaatggagacttattagctagtaaaattaacaaactgaattatcttgacgggctgtcatttgttttgggtaatcttgtttttctctgtcattgattgcggcaatttataaaccattctatcttcttggcccatgtgtagatctggccttgccttagacaggctgacaccagaactaagatggttgggagtttttggtctccacccttgggccagtacttgttttagatttaagaccttagctgttgtgggtctaactattaagagacctagttctttttcagtttcactcccctgcctgctttctccacaaaaaccctaccacagataaacaatatatttaaaatgcagagatgggaacataaattttaaaaaatttattttgtctataaaaggacatcttaaagagtatcaagagataagtgttaaaattattctattttacatttgtacttccagtgtactgaatgtgatataggagttaagaagcaattacttaggcagatagtaagggtatgggagtcctaggtaaggcttttctttttaatgaaaatcagccccaaataattttctaagagagcaagcagcctgcaagctgggagcttgcacaggtgaatgcgggcaggaactaaggactaaagatgttaaatatggcggtcccatcttcccgtctctgttagccacgtgtactgtaaacgagcagacaagatggtgccaatcaactggaaagtccatttgcataagaagattagggtggggcaactagccttcccagcacactatgtagacatcatacctgagtgaaccaacctgtgagccctctgtaaatcagacaccgccttctccagcctgcgtataaaatctgctgcggtcctctaccttctcccttttccacgtgtctcttgctcgtgaggagctgctctcccctcctctctcctttcttctattacactttctgctccttaacccactcacctgtgtctgtgtgccgaattctttctcagtgcatgacaatgaaccccagggtatataccacagacagcagtagccacttcagatggatttcattcatgtctcttatttagggaatatctgtaaacagcggttggtatttctttgattgattataaatttggagatgtattaagaaatacatcttaattcttaagaaatatttctaggtgtaaaaagttaagaatttttgctaaggagggggtttcagaggggttttagctctgaggcattttggggctggtctttagaactttaggataatttagaacaattattgagttatgcccttttcccttgatacacttttatctcctacgtgttttccttatttttgttacagtaggtagctagtcagacatgagcagggcagaagagggccttccccaccaggcatgccaggagaccgtcaggtgatggtcaggcagttgttaaactgtccgtctacaataataattggtcacagctggcaccagaaaaagtggtctcccaatagacagaaacaccgaagctggtgatcagcagcttcctgatgacatctcaggacttaggtgagtgggctcaagcatgtggactaaggcaaaatggcacagtttaactgtcatctaaccttcttctaggaacacttggctggtaagggaagaacgcctcaagtgagcatgcatacaactccagtaaacactgcacatgtggcccctctcaagtgctggcagaccatggcacatgcaaacagcccaccccaagagaagaatcagggtagaaggcacacaacacccgggaagtatgccaacgcataaaacccgaagtcaaaggtcaaacagtgcacttgatctcgcaagtcgcccacttggccctcttccaagtgtactttacttccttttgttcctgctctaaaactttttaatacactttcactcctgctctaaaacttgcctcggtttctcactctgccttatgcccctcagtcgaattctttcttctgagaaggcaagaattgaggatcctgcagaccacacagacttgccgatactaacactttaaaatgacgttcaccatttctactaatcttaagtcataaatacttatgaatgtcctgaaatcatatatttttattttaatttcatggcttgataaataagtgcagtcagaagactatttgatagattctttcttatatgatgttttattagttcattgtttagcaggtatatcctttttaatcatagtcttctccccaaaaatgtattaaaatgcaatttagaaaattataatagctttgaatataatatttcaaaagaccaggggaggtgacaattacaaaaattacataaatgaaacctagttaatcttcctttacctcttactggaattaattctaattagcatgacatctgcacaacaaaaacattcaaggccaaaataagtgaattaaattggtacgttgctctttctcattcatttgctaaaatgcctagattctttattttctactgaaattcttaaggaatgaggatatgaggtggagagaatcagataaagttcctttttttgtgtgctattgcaactctctgtgagtcacctcctatagccaccctggacaacaagcaattattaacctactggatcttgtctgctttcagcagaagtgaagctcctgctccgcattcccaagcttacatagttctcctgctaggacgttacctaccttccctcttagaaatacagttcagagtccagttccaaattccaggtcatccttggtgatcttaagccagatgcaaatatttaggcagtctcagcccccagcacctatgccaagtgatgggttaaggcaagaattttctgctatatcattttatctgaaaaatggtgttgtagatagtgttctttgggaagcagactctgagatgaagttttgtgtgcttaatgtttattagggacgtttctaaaggatgtaatgtttgtgtgatcaacacctatggaagggatagaaatgaagtaggactgggcacaggacccttgccttggctgatctcactgggagctctgagctaaaatggcccattggagttgtcctgatttggttccaaatggcctccaccagctcagtcactggatgtccctcagttgggcaagggcatgactttgggccaggcagctctttgcacctgatagcaaaatgcagtctacaacagccttctagcagctaggtcaacaagcccttactggaagggggatccggagggcatatctcattgcccaccacaagtggggataataacattacctactgcataggattattatgactgctacataccgtaactgtgaagcagcttcattgtgcattggttaccacttcagcccatcttgggtggcaattttactacttgtctgagtctggcgagatagaatactcatacacacagcaagttacatgaagtaggtttattacctgcagacaggcagcaagggacaagagaagcctaggaccagggtgagctggcttcccaagactcaggaaagctgccccgggtgggtgaaatctcatctggatgtgctccacttcacgctgcagctgagtgcccccagaaatcaccctgccctgggttttatacctcagagcaagatttgctgagctaaagcattgaaagatattctatgtgcagggggagcaggagagtacaggctattccagactactttttttttttttttaatttcaggatgttgcattcccagcatatactacagttattcttgagaaacaagtgtgtaaggaggaagaactggttcaaggccacccagaaagctgttctgcaataacccatagaaacagtggagcacaggttctggtatataataacacttaatacatgtcagatatttattaattcatgatgctaatcatctgtaagattaagaaaactgaagactgtgtattttcaagtggttccagatttgtatccacccagtttcaagtccactgggacttcaatccaatttcaaatccccctctttttttaaaattttagtgtaagttctgggatacatgtgcagaacgtgcaggtttgtcacataggtatacatgtgccatcgtggtttgctgcacctatcaacccatcatctgggtcttaagccctgcatacattagatatgtgtcctaatgctctctctccccttgctccccaccccctgacagggcccagtgtgtgatgttcccctccctgtgtgcatgtgttctcattgttcaactcccacttttgagtgagaatctgcagtgtttggttttctgttcctgtgttagtttgctgagaatgacggcttccagcttcatccacgtccctgcaaaggacatgaactcattcttttttattgctgcatagtattccatggtgtgtatgtgccacattttctttacccagtctatcattgatggacatttgcaaatccccctcttctagtaacagtaaaataccaaaaatggttcttattgtctctgattagttaataaaccccatctctgaatcaattactgtggccagaaggatggaatgctagatatggtctgttggaccctgacatatatttccacttacttctggtgccctgactcaggaatacaccattcttcagaataaaaagaacccaagactttggcatcaattgcttctccttcagtctgaaggggaaggggcctagtggatagtaaatgttcaagaaatactatataatcctctaattacaacacagaaaagtttggttttctttctttttgttgaaaacagatagtggcaaattatcttttttaggctcataagaaactttggtaaccatataaatggattcactttctcttcttacagtatttctcaacactcagtgatttgtttaggtaggtatttcctcctattttctctttatttagaactaaagtggaagaaataaaatgtagaatcaataaaaattccaaagagtccacaagggaaacaagcatcccagccaggatggagtgatgctacagtttaacactgagatccatgaaattgattgctgtggcaaataaagaagaacagatcttatttgtggcctcaattctctgagttgttgtgcctacttgaatttatctgctggctcaagacccatttagtagtgggaaagagaacactggcaaaaaaaaaaaaaaaaaaaaaaagaatataaagatcatagaaccagaaaccgtaggagctggaagtccccttagagattatctggttccttttcaacttctatcagccattctctgacccacaactaagaccccaaggcatcctttacctcctaaacatgttgatttgtttccgtctcccttacttttaaactcttggatagcctgtctattattcaccatgtgaaagccttttacatcatctctcaaatctctagcttcttccttatctttgagcctactggaatacaattctgtcttatgcattaaacatgatggtatgttttgtgttactatttatagtaacataaaaatgaaaatcacacacttattttccatgaagttatgtgatccttttcaaacaaatataattcaggagaaaacaaggatataagataatacaataatgccaggataaatttttcccaagatatttcatgaagtaacaaaataatagcagaaccttcagaatttaagttatcttggacaaattacttaactttttaggccctctaaagtagtaataacaataatatctagtattagtgttctgttgctaaacaattactgcaaacataacagctttaaaagtagccatttattagctcatagttctgtaggtcagaagtcccagcaggatgtgggtgggttttcagctcaggatatcacaatactgacatcaaggtgtcaaccaggctgggttcttgtctggaggttctgggaaagaatacacttccaagcttattcttgttattgacagaatttagtttcttgtagttgtaggactggtgtctccatttttttactggctgtcagtgagggggctgtcctttgctctgagagtctatctgaatttcttgccatgtggtccctccatttttaagccagcaatgtcacatcaaatccttcccatgttttaattccctgacatcttctgctaccagctacataaaactctctttctcttttttaaacaggctcatgtggttaggtaaggcgcacctagatcatctctctatcttaaggtcaactgatttgggacattaattatgtctgaaaaatttcttcacagcactatttaggttaacgtttgattgactatcttgtgtgtacacaagggataggaatattgggggcatcttggaattctgctgccacatacctacttcatagatcttttactaaatgagataatacatgggtaaacagtgtattaaaagttaagttttgttggaaacactaaggaacatgtatttttgctgatctgctggatcacttcattggtgtgaagcagcagctgggcctgcaactgctccaccttcctctggatcttcctccagcttctccaactgcccagccagatgtgtgtgattttagctctgtgatgaagggctctcaccaaggccagagacaataaaaattgacacaaggttcagttcatccttgtggtgtttcagcacatgcttatgggttccagcctgtttgtaccgtattacatcactgctatcgtacctacacttctagctggtctcctaagggctaagatcatagtagtagatgccattttctattatcgtcttgtgttctctctaccctctgtcagcacatcagcaggatgaacttctttacctgaataggtgactccaactttcattggttagaacgagggaccctggtggtatgattattacgttgccagttttccaggattattgaacaactaataagaaatgctttagagaatttcctggattcaaaaatatgtcttcttgctcatgctaaagagcaccacctcaatttctctctggtaatcatcacaacagttagggactccttttctgcctattggttttgtagcataaggagtcccaaaagggtagggtgcaatctcagcttccaatgcatcaggactactgtatgttccttggtagacgctttcctccctgaaacactaggacctctaaacccatcaggccaaggtagtaggaaggagaagcaaacattatttggtaaaatagtgatggggccaaaccccctttgccctattggttattggctatacattatatgcattctggataagtgacatcacatgcattggttgccagtttatggcatttaccacaccttgtaaggcaggatccaaacctcacagggtgctgtctcccagctggtgtcataaaagagttttcagaagaccattccaccattccaccaagcagctgttgctcaacaggagaaacttccagccaatcaacacaatcataagaaatagtaaatcctttttttttttttttttttttttttttttttttttggcttttcttataagtctctatgttctggggtggtttgttattcagaaataggtaatcaaaacaaaaatcagtatctagaagtgaggtgctgctgtaataaaagtaaaacacgaggccttgactttgggaccaggtagtgagcaggtgctggaagagaagcaaggaaactgctattggaagctggaaagatggcactttgagttttgtagcagctaatcaatttgcagaattgtcacctgcagtaacttggaagttagaaaatgtacccgaacgtatggatctggctaaggggatttccaggtagaatgttgaaagtgccaaatggctttcttagctgcgtataataaccattggaaaagagagaactgttctgtttgtaagcagaatttaggggaaatataacagagatacaacttgctgtttggaaaataatacagtttattatccctagtctttcctagagtgagaaagtctcaaactaaaaaatagtcacaggataaggatcagatgaaggatatggcttcatctatatggcttcagagatatgcaagatctctgaagatttaagatggtgcctggttacttcctcagctagaaaaaaaagcactttaaagaatcttcagggaattgtcctctagaagttctaggtgaggcccaaagtacagtgatctgtcttgaaagaaatgatggttttagattgggacacagggtaaactgcaaacattctataaagagctcacaatgtctttaaagggatttaccaacttgaactgaaagagacaggatcaaatcaaaaggcaacgagggtttggttccctgactttctatgcgcaggaaacaggaagagaaaactgctcgcatgcaagtgcaagacactgcttatgggaaggaaaaagctctcacagagcaaagctgagaacttctagaggaaggaaccaagaactgcaaacaattattagaaagcagaattaagccttaatcgtggaacacttcaggatccttggaggtgcatgactgggtgtatttcagaattgctatgggccaatgactactgtatgcctctcattgctttctattttaagtgggaacattgactgcaattaccctgttcttgtctcaacatggtgtgttggatatgtgggaacagataatttgactttttgttcacatatctctagattaagagttactgatacacaccaacaatcccagcaatttaggaggctgaggcaggaggattacttgaagctaggagtttgagaccagactggacaacatagcaaaaccttgcctctacaaaaaaattttaaaaaaattagccaggcgtggtggtgcatgcctgtggtcccagctactcaggaggatgaagcaggagtattgcctgagcccagaagtttgaggttgaggttgcagtgagccattatggcatcactgcactccagcctgggtgacagcgagaccctgtctcaagaaaaaaaaaaagaaaaaggaaggaaggaaggaaggacagacggatggagggagggagggaaggaaggaagagaaagaaagaaagaaagagttactgatatcaaaaagtcttgtctaaacctgaataaagataaagagattataagtctgtagcctggtgacatgattgggtgaaactctggaggcctttggagggggtgagtgtattttgtatgtgggaagcgtatgaatcattggattaggggaggactgaaagattggtgaggtcatagatgtggttgatggaaaagagatgaagagaagtatcaactattgtagtagttttggccacttgcttaagcagatttctcatactttccaggcctgatcggacccatcttatatggacacatggtacattgttacaccagtggctcccagtgaatcccactgtacccttgtgagcccaggcaaaatcagcagaagagtgtagcaatggacagttgatagagtgtagaatgccatttccattttataatggaacgctgctatgaacatcccatttttaatggttttgtgggtcagataacatccaattaatgaagaacagtttagttacatggtcactcagggatccacggtgaacattctatcttgaccagatcctgaaatcaagcaagaagttgcttttcaaatggaaaattactgttagcgtgagagaacatggctttactcccaaagcctaagagtctgttctgtgattctcctatggggacttgccagagtctccatacacttacttccctgcttggcataaacagccacattacagggctcttcctcaaggaaactgacctcctcctccataaagactccgtgtctacaacggacttaggtccgggaactggaccgagactgtgaatcccaggaaggcaacttgagttaggactagacccacttgccagattcgtttttctgattttgcaggcagagcaataacctcaggaggaagcatttatttcatttttggaggtcccataaccagtcagatccctgcagatcaaaacattgatcacgactccattcttgaggcatactatggaatggaagttcagctatggcttccaaagcatttgccatttcaatgtagatttttaattcatttgttttattttggatgtttattattggtggattctgggaaccctaggtagcctgattatcgcagtagaagcaggaggaatcctggaagaattgatgcttaattataagatgacaaactcagtagacagggagttaccaataccaagagacactaggtaaggaattttattatagtaatgttgaaaatgctgaagggtttgggggatgccagattcatgcagctacaaaagcagctagatctttgctctaataggacagtcttcaaaagtgtgcattataatttatttatttatgttggctttgttagcctttatacctgagaatggagagaaataggatgcaccccctgcttctttatttgactacagcttttaactcagagtgagacgtcaaaagacatttaaactgtaatcattaactaataaattcagataaataaatttaatataattatagaagtaattttgaagcacccatatttgaagaaaaatgagaaagataagcagtcccactgttttaggtaactatttctaagccaaataaaatgtgatataaattgctagggggtgaagtgcaagcagactcaggttcacatcattaaaggacttttgctcatcactcgcttgcaaagcgacccttaccttctcccatatacagaaattaactcaaaatagattacagacttaaatgtaaaatctaaaactataaaacttgtagaagaatacataaaagacaatcatgactttggcataggtcaaaaatttttaagtatgattctaaaaggcatgtttcataaaagaaaatacagataaatttgaattaattgaaaatttttgttctttgaaagactgttaagatgaaaagacaagccatagaaagggaaaagttcttgcaaaaaatatgtatgataaaaacctgcattcagaatatataagattgttttcttattattacattttgagagtttcttacatattggatatgttaactagtttgatgttaaccttgtgttaatgatatgatataatcattccacaatgtatatatatttcaaaacattacattgtacaacataaatatatataattattatttctcaattaaaaatgaacattttaaatgtgcaaaagttcaagtagacactacatagaagaagatacatggatgataaactcacacgaaaatgtgctcacatcactagaaattagataaaatccaatttgaagtacaatgaggtagacctacatacctatgcaaatggaaacaaaaacaaaaacaaaaaaacacctgacaaaaccaagtgctggtaaggaaacagggaaattggaatgatcacatatttctgtaggaatgcaaaagatgcagccattttggaaaccaggttggccattttttagttaaacacatgcttgcaacaagatccagtaatccaactactattgtttactcaaaggaaatgaaaacttatgttcacacaagaatttgtatgtggatttttagaacaattctattcataagagccgaaaatggaaaccaatccaaatgtctatcaatagggggaatgggcaaactgttttcatctatactatgtatcatagtaataaaatgaaacaacctgtgataatccaacaacatggaagattttcaactccattttgccaagtgaaataagcaatactcaaatggctacatagtggacaactccatttatatgacattctaaaaaaggtgaaaccatggaaacaggaaatagatcaatgattgccagggcctgggaatgggaagagagatttattgcaaagaggtattaaagaatttgagaattctttaattttatatattgattttggaaatggttacaggactatttctgtcaatcaaaactcagaactgcgcagctaaaaaggataatattgaatgtatataaattatatctcagaacatttgacttaaaatacatgagaacaaaatgaagacatctacagataaagaaaaagcattgaaataaattattggtaatacgcttgtgccacattgctacaagaagtcctttaggcagaaggtaaatgacatcagacagtaaatcagatctatgagaaggaatcgatagaactggaaatggtaatagagtgtgtgtgtgtgtgcgtgtgtgtgtgtgtgtgtgtgtctatgcatgtgtgtatttcgctctcttaatttatttgtaagacatatgactgtattttggggttcatattgtatatgtgtgcaatgcatgtgaccatataatgtggggagaatgactgaacttgtcgcaaaatttctatattttacttggagtaagtaaatattaacttgaataatattgtaatatgttaaatatatatattttcatcaggaatcaacaaccgaaaagataaagaaggcaaataaatataactaatagttggaaaagttaaaattgtatagtaagaaatatttaacacaattaaagtaggaaaagaagaataggacaaaaaaaggaagagaaaaaacaaatggcaagttggcaggcctaagttaaatcatgtcaataatcatattaaatatgaatgtgccaaacattctaatcaaaaggcagacattgtcagactgaatgaaaaatcaaggtctaattatgtgctgcttataaaagatggactttaatttcaaaggcacaaattggttgaaagtaaaaggatagaaaaatgtatcctgtacaaatataaacatacaagggttgagtggttgtattaaaatcagatgaagtagactttaatataaagaacattactaaagacaaagaaaggtattttattatgatgaaaggctgaatacagtagggaaagaaaacaagcataaatgcatctgacaatgagctacaagatatatgaagcaaatattgaaacataattgaaaagagaaatagagaagtcaacaattacagttggagatttcaacattcttctctcagtaattgatagaacatgtaaataaacaaccagtaggatactggcctcttgagcaacattatcaaccaactggatcaaatatagtgataactgtggaacacttcaccaaacaacagcagaacacattcttttcatgcacttggaacattctttaaggtataccatgtactaaaccataatatatgtcttaaaaacttaaagatactgaaataacacagcatgtattctctgatttcaatgtcagttaggaatcaagaagagaaagagagagacgtgggaaaccccaagtatgtggaaatgataaaatgaatgaacatgtaagtataacaaaatttcttttcttttcctttttgttttagagactaggtctcactctgttccccagactgaagtgcagtggtgcaatcatagctcactgcagccttgaactcctggccttgagtgatcccccacctcagctttccctcccaagtaactgagactacatctgtgcaccactgtacctggctaaaaaatgcaattaagtaaacttgaaatgcagttaagtaaacctttgagaaagaaatttagctttagagaagaagaaagatccaaaacaagtgatctaagcttctaagaagctagaaagaaacagaaattaaattcaagtagaaaaaaggaaaaagtaaaatcagaatggaaatcagtggaatgtgaaatggataaacaatagaggaaaccaagattgccaaggttagcttttaaaaaagactaataaggtagaataacctttagctcattgatcaagaaaaaagagaaatcatgatcaatatctggatgattgagatcactatagaccctacaaacattaaaagaatgataacagaatgttacaaacaactttataccaaaaatttatgcatttatgtgaaatagataaattccttagaaagtagaaactattgaaattgactcaaggaaaaaaaaaactgcaaaaaatctgaatatctctttacaaagcaagctgatttaaatagtaatttaaaatatctttgcaaaatatattaaggcggatttggtggtgaggttttaccaagcattagggaaaaaataatacaaattatcctttcagaaaagagagggggaaggtataattttcaattcattttatgaggacagtattactttgctacaaaagccagccaaatacttcgtaagaaaactagagattaatatcctttatgaacacagatgcaaaagttttaaacaaaattttagccaattgaatccagcaatatgtaaaaatgataatacaccatgatcaactgggttttatctcaggaatgcaaggttggtttaacatccaaatgtcattagtatagtacaccatatgtgaaaggcagaataatggcccttcagagatgtccatgtcctaaatccccagaacctacaaacatattaccataagtggcaaaaggaactttgcaaatgtgattagcgtcaatcaccttgacatgaggagattatcctggattatctggatgggcccaatggaatcataacggtctccataagggacacatgaaggcagagggagatataactacagaagagaaaggaagagtgattcaatgtgagaaggacttggcacataatatggtttggctctgtgttcccacccaaatctcttcatgaactataatccccacaagttgatggagggacttggtgggaggtgattggatcatgggggcagtttcccccatgctgttctcatgatagtgagggagttctcacaggatctgatagcttaaaagtggcagtttcccttactctctctctttctcctgccaccatgtaagatgtgccttgcttcccctttgccttttgccatgattgtaagtttcctgagggctcccagccatgtggaactgtgagtcaattaaacctcctttctttataaattacccagtatcagctatttctttacagcattgtacaaactagctagtacagaaaattggtactgagagtggggtactattacaaagataattgagaatgtggaatcaactttggaactgggtaacaggcagaagttggaacagtttggaaggctcagaagaagacaggaagatgtgggaaaatttggaacttcctagagacttgtctaacgggtttttttttcaacttttattttcaggatgtgcaggtttgtcacataggtaactgtgtgccatgatggtttacagcacagatcatcccatcacccaggttattgagcttagcatccattagctatttttcctgatgctctccctcctcccagcctccctcataggtgcccaaatgctgataatgatatggacagtgaagtctaggctgaggtggtctcagatggagatgaagaacttattaagactggagcaaaggtcactcttgctatgctttagcaaagagactggtggaatttttccctaccctagaggtatgtggaactttgaacttcagagagatgatttagggtatctggcagaagaaatttttaagcagcaaagcgttcaagaaatgacctggccttttctgaaagcatacattcataagcattcacaaagagatgatctgaaattttactcctagctactttcctaaaagaagttaaaacatatgtctacacaaagacttgtacatgaatgttaattgcatcattattcataatactccccaaatggaaccaaccaacctcagtgtccatcaactggtaaataaataagtggtatatccacacaatgggatgctacatagcactaagaaggaatgaccaatgatacataccacaacatggaagaatctcaagaacagcatgctaaataaaagagccagatatagaagacttgatactgtatgattccactcatgtgaaattccagaaaagccaggctaaaatgttagaaggcagatcaatgtttaccaggggctggagataagaacaaaaattgactgtaaaaggacacagggaacattctagggcaatgaaaatgctttaaaccttaactgtgatgctatttgcacacctgtgtacatttaccaaatctcatccatctgtacgtttaaaatgggtgaattttattgtgtgtaaattataactcgagttgttaaaaatataaacatctctaataaagtaaaataaaataaagtaaatgaaaataaaacaaaacaaaaaatagtccagcaccatgatgatcttttcatgtgtcaatctggctatgttatagtttctagttattcaaacaccaatccaggagttactgcgaaggcattttatagatgtgattaaaactcataatcagttgactttaagtagggaaggatatcctaggtaacctggactgactcaaacaaagggtctcaaaagcccagctgagtctcccttaaagaagggaggctgatggcagcttcagccgtgcagagtgttccagcctgccctccccaatggtctgtcttatgaatttcagacttgccttgtcagccccacaattagataagccaatttcttgcaaaattttcacatgtactattattttgtcccatgaaactgatcagagttgtaattttgctttgatttttgattatgtgtttatcttaattggcaaggatattgtcttcattcatcacgtgcattcattcttcattcattcatcaaggatattgtcttttttattcatagctacgtatatgctgcctgacctatagtgtacactctgtaaatatttgttgaatgaatgaagtattattttatgagtatgtttatatttgtcagaccatctccaaaatgttggtttgtgaaatgtcaacatttatatcataaagcaggagcagggaaactttttcttaaaggaccatatagtaaatatattcagctttattagccaacagtttacgttattggcccacaacagttgactcaactctgttgatgtagggcaaaaataaagatagttaatatgtaaatcaatgagtgtgtctgtattctaacaaaactttatgaaaacaggtggggccagcgcaatggttcacacctataattccagcactttgggaggccgaggtgggtagatcgcttgagtccaaagtgtgagaccaatctgagttgagtaacatggagaaaccccatctctacaaaaattacaaaaaaatagtccagtgtggtggttcatgcctgtagtcccaggtacttgggaggctgaggtgggaggatgcttgcttccaggaggtggaggctacagtgagctgagatcgtgcctctgcactccagcctgggtgacagagcaagaccctgaccctgtcttaaaaaaaaaaaagaggaaaaaagaaaagaaaagaaaacaggtgactagtctatgagtcatactttgcccacccttgcataaagtcctgctcatctacagtagtcatggactattgtgtttaagaagtatctggttactatgtaatttattagggccaaggtgttagagtacaataagagaccttgtcatcatagttgtaatgaatgtgatgaatataatttatctgatggttcataaggtgctctagcttcacctcgtccccatgtaaaaaaatctcattgcaaaatacagcgaagatgtatggaggcattgacctaaatcagcaccaaatgcacggaagtctctgaaaacttattatatttaataagtatctaaaatgttattatttgcaaggttttgggtttcatctcctacatatgtaggctttgagccagtgttctatcactcagctgtgagagtatgacttattggcctcaggactcagctgtgaggatttaagagatgactgagtgagcagcacttttattacagaattccaggagatgactgttgttatattccctatattcccatttatctggaggtaatattctttacctgcataccaactttctagaacctaccactaaatgcaaaaataaaaggtctttaaatatgaggaataattttcccaaggtctttggggttaaagccgtgtactttattgcttatttcttactgattttttctttacatgcaaccctaacaaacttgattatttacacttccagccatggcaagtgagaataagcaaggtcttggtgaaaatacccactaagagcagaaatactgctgactaaaaaaaacaaaaaacaccaaaaaaaagcccactgtgtttatttcatgcactgtattaaataactatgattcatcaagaacattttaaattatgttcattgttctctttttagaaagacagaaactatgctgtgcattttaggataatttccattaaaatagtttatttaaattaattttcatgctagataagaaagtttgattagctggagataactcatatgtaacagcagctgataatgcctaatggccaaggtattaatctgggacatgtacctctttcctcttcttctttgtaaacatttattcatgctgctcaatttctttgcataatagatatctgcctttagagccaagtttctgggaagtattttttacagtagcaggtgttttttaggtcttctgcagaaaactccctcagacagtatgcggattttgaaaagaaagggtgatggaaaatgctagtcattgttcctgcttataaaattccaaccagagtagggcttttgttcaggaaaacagaaggggaataataaatgccaagtggaatgatcagatgcaattagaaacttatctgccaaggtaatgtgtgagggacgatttgtcactagtcccaagtactctgtgttataagctgcaggctgagttgtcagtttgttgagaaaggcagcaaaccactcctgtcctgctgcagaatcacaacttccaagggcgcccctgggagactgagagccttgaccttgggctggattcccctgtagtttattgggagtggacactgagcagtgaaggcaggaaagacgaatatgcttttggattaggctggctgcgtttccgctgagaacaagagcacacaaatgtctaggagggcagcaggataagtaaacatgcaggccatgaaaccagcctggtggattttagattgaattccgcaactaggctatgcgtgggcgaagtgggaagtgagtgttcacctggcagatccctctccagtcttgtacaaaattcccacgtcatgttaggagtcgatgcctgttcttcccactttactatcactgctgggcacagcagctagttccaagcatatctttacttttcctaaaaatatatatatatatttttgaaaataggtaacacctacctgcacttgtataaatgattacaatatcacaaaactaaagagtaaggcaggccaggcatggtgggtcacgcctgtaatcccagcactttgggacaccgaagggggcagatcacaaggtcaagagattgagatcatcctggccaacatggtgaaaccccgtccctactaaaaatacaaaaattagctgggagtggtggcaccagtagtagtaccagctactcgggaggctgaggtacaagaatcacttgaacctgggaggtggaggttgcagtgagctgagatcacgccactgcactccaacctggagacagagcgagactctgtctcagaagaaaaaaaaaaaaaaaaaaaaaaaaagaagagtaagacaaggacctcagcaaatcagatatatgatatgctatggttatttagctggtcatccaatgttgaccacttccataaagaaaatgtggtagatatatactgtggaatactactcagccataaaaaaaaaccaaaataatgtcttttgcagcaacttagatggagctggaggccattatgctaagtgaagtaactcgggaatggaaaaccaaatattgtattttttcactgataagtaggcgctaagctttgaagacacaaaggggtaagagtgatgtaatgaactttgggaactcaggaaggggaaggttgggagggggtgaggaataaaaaactacatattgggtgcagtgttcactgcttgggtagtcggtgcattaaaatcctgagattttaatacccaccaaagaacttatctatgtaaccaaaaagcaccagtaccccaaaaactattgaaattaaaaaaatattgaccacttccttacacaggtggctataaacgtagctcttacaatcaaatccgggctatgctactatagttgggtgaactctggcaaatacattcatatctatgaatccaacatactcatttataaaatgtggttcataatagcacctactgcctagagttgctatgtgagattaaatgagaatttttttagcatgttcaagaatttatctcaatgtgtgtcacagaataaacacccaatacctggtaggcgctacttctgtgacactcttccttccccatgcttcacggcaccggcatcgtggggctgtctgctgtcgccatgcctgctgcaacagcctctcgatggccaccctggaaccagcctgtccccattcataccctgcttgcaagttgctgccaagatattttttcatagctatatcgaggtataattgacctaccacagatgactcatgtttaaagtgtacaattttataagttttggcacagctacatacctgtgagccagccccacaatcctgtagtgaacctacacatcacccttggaaagtttccacgtgcacctttgcagctgttctctcttgcccttctccctaccctcccttaaccaggcagccactgactgtggtatgctgctttagattaatttgcattttctagagttttatataaatgaaacattcagtatagactttttttttttactgacttgtttcactctgtgtaaacattgtgagatttattcatcctgttttgtgtatagtacattcctttcttcctcctattattctattgcatggacatatcaaatttgtttatccatttctctattgataaacatttcagttgtttctggttttggttaatataaatcaagctgctacgaacagttgtgtacaagtctttttagggacgtgtgataatttttttcttggatagatacctcggagtaagtagaatgtctggatcatatagtaggtatatgtttaattatttaacaaactgccatacttttttccaaaatgtttttgttttgttttgtttttaccattttattcccaccagcagtgtagaagagttctaattgctccatatctttgccaatacttagtatggtcagtctttttaattaatcaaatgggtacgtatcacattgtgattttaatttgcttccctaacgactagtgatgttgagtattttttttcatgtgtttatttgccatctgcacatcttttttatgaactgtccaaatattttacccattattaaaagtctgtcttctattttttaattttgaaagttaaatatatatatattctggatacaagggctttatcacatatatatgctttacaagtattttctctgaatctatggtttatcttttgttgttaactgtagactactttttagagaagctttaggtttatgcaaaaattgaatagaaagcactgagttctcatatactctcccttttttcatttcccctgttattaacatactgtattagtgtggctcatttgttataattgatgaaccaatagtgatacattatttttaactaaagtccgtagtttacatttgtaactcttggtgttgtacattctatctgtttggctaaatgtgtgatgacatgggtccaccattataataccatacagagtcgtttcactgctctaaaaatctgtggtctacttcttcatccctccctcccccaaacccctggtaaccagtatctattgtctgcctttattgtctactgtccgctttttccagaatgttgtatagctgcaatcatacagtatgtagccttttcaaattggcttctttcacttagcaatatgcaatttagtttcctgtgtttccttttattaatgaacagtatttccttgtataaatgtaccacagtcagtttagctgtttacctattaaaagacatctgggttgcttccaagttttggcaactatgaatgaagttgctataaatactcgtgtgcagggttttgtgtagatgtaagttttcaacttgtttggataaataccaaggagtaagcttgctggattgtatggtaagactatgtttagctttctaagaagccatcaaataaaaaaggggccatactattttgattctcatgtggtttgtcttttcattctctgaagtctcttgaagagcagaaattgttgatttgatgaagcccaatttaacaacttgttgttttgtttgtgctttttttgtcttatctaaaaattcttttgtttattcaaagtcacaaagatttatcctcatatttttttttctctagaagttttaagtttaggttatgcatgtaggtctaagatccattttgaattaaatttgtccatagtgaaatgcatgatttgtagtttatttttgtttttgaatgtggataaccaattaattgttccagcaccattggtgaagactgtcctttcttcaaggaattacctttgcattttatttttgtcaaaaatcagttgtccattcttgtttgggtctgattccaaactctctgttctgctccattccttcatgtatctatctacctgccagtaccacactgctgtggttattatggttttataatatttcttgaaatcacatagtgttagccctccaactttattcttcatactcaaagttgctttgattattctaggttctttgcatttccaaattaatttcaggattgttttctcaattattgcaaaaaaatctctctgggattttgattgaaattgttttgactttacagataaatttggggaacatttactttttgaaaatattgagtcttatgacccataaaagaggtttaactctccctttatttgtgtcttctttaatttctgtcaggattttttttagttttcagtttagaagttattcacatcgcttgtcatattcgtccctaaatatctcttagcctgttttctggtgttataactgcatacctgagactgggtaattaagaaattgatttcttgcagtcgaagaggctggaaagtccaagatggagggtctgcatctggtgagggccttcttgttgtgtcacaacatggtggaaagcatcactgggcaagaggacacatgagagagagtgaaactgacttttataacagatatcttctagtgataactatgccactcctgtgataacccatccatccattaattcatgaatggattagtccattcatgagggcaaagctctcatgacccaatcaattcttgaaggcccaacctcttaatactattacattggggattaagtttcaacatgagtttcagaggagacaaacattaaaaccaaagcagtattggccaggtgccatggctcatgcctgtaatcccagcactttgggaggccaaggcaggcagatcacctgaggtcaggagtttgagaccagcctggccaacatggtgaaaccccatcactactaaaattacaaaaattagctgggtgtggcggtgcatgcctataatcccagctgcaggagaattgcttaaacctgggaggtggaggttgcagtgagctccaccactgcactctggcctgggcaacagagtgacagagggttgagactccatctcaaacaagaaaaaaaaaaaagcagtaacttattgttcattgctggtgtatatcaatacaattggttttttgtatatttttcttgtatctgaaagcttgaaaattcacttagttctagtagctgttttgtatgtttctaaggattttctacataaatgatcctgtcatgtgtgaataaagacagttctacttctttctttccaatgttgatgcctctgatttcttcttgcctcattgcactggccagaacctctagtacaatgttgaatcaaacagtgagagcagacatccttgtcttgttcctgatctttgggataaagcatctagtctgtcactgttaagtatgacattaactgtgggattttttgtatatgctttttaacaagttgaggaagttctcttctgttcttagtttgctgagcatttttaccaggaatgggtgttggaattcgttacatgcatttctgtgtctgttgggataatcatgttttttcttattttttagtttgttaatatagtgaattatattgttttctgaatatgaaaacaatcctgcattcttggatgaatcccactttgtcacaatatgtcatcattttaatacattattgaatttgatttgctatttaaaattttttttgcatgtttgttcatgagggatattggtcaatagttttcttttcttgtgatgtgactttagtatcagtgggatgctggcctgaaacaatgagatgagaactgttttctactcttcaattttctggaaatgtttatacagaactggcatttttttttttttttttttttaagcagtctggctctgtcgcccaggctggagtgcagtggcacgatctctgctcactgcaagctctgcctccctggttcatgccattctcctgcctcagcctcccgagtagctgggactacaggcgcccgccaccacacccggctaattttttgtatttttagtagagacggggtttcaccatgttagccaggatggtctcgatctcctgacctcgtgatccacccgcctcggcctcccaaagtgctaggattacaggcgtgagccaccgcgcccggccggcattttttttcttccttaaatgtttaatagaattcactagtgaagccatctgggcctggagttttctttgtggggaggtttaaaatataaatttaatttcttttttatatagggctattcaggggcattgctagcctgtaagtcatttcctgaagctcccctccatctctcccctgagcctgggggtagtggacaattccagttcttccagaatagaaagctcatcttcctgcaatgtgcacattttcacctcattctcaccagttctctttgacctcaatccccaactactttatttggatgccttttctaagatgtgataatgcaaactttcagctgttcatgccctttcctcgtaatccatagtcttgtttgtatttggtctccttcaccttttcctgggtccctggggatctttgacagctctcatgcaaattctggtattttctaaagtcagaaaagctagggagaaaatgagaacatccttgtgttggaatccagtatcctggggaattaggaatcttgattagtccaaagaggtaagaaggaaatgtcagctgatattggtgtctggtctacttaatacacaggagggaagctgcccttgaagacagaatgagcaaaagcgcctctccctgataccccgtctcccttgccatcttcagtggcagtctttccttttccaggactcttcctaccaatcaatatgacaagccttggacagtcagcaagcgatagtaatattatgatttttttgtcttgtaatctattggctcttacactttaatcaccatcagaattgcttggagggcttgttaaaacacaggttattgggcccaactcttagactttttgatttattaggtccagggtgaggccttaggaaggaagaaagaggaggctgcagaaatgtcacaatcctgagatcatagactgtcacaagctagaactacctatggaacaatgtctcaaataggtgaatgtgtgtaggctttgcgtctggtaaccatggttaccatgggcacagggagagaagcttcacactaaagagtgagcagtaaataacggtggaagagcctcctcccgttgtctacagggagtctgggcagggggctgctgggatacaatgcagggattgtgtctcaagactgtaaatgaaagacacaattccttgcttgcggccttggtgttctttgctactgcgggcctcttgtatggctaaccagttgatcattgtcaagaaatggaatggctcatagacacgcactgcctcctcagatctcctggtggtccctgctgcaggagagaagacctcaggactgtgagaaagcgggaccacttctcttagcatgaggaccttaaagaactggtgtaggttgttagcagttgtggcagcctgctgccttggttatgacatctggcccttgctgaaatggagaaggttgagcccatccccaggagttaggatgcacaggtggggaagctcccagaactccttgcctgggagggaaggcaggtgcatagagtcttggcttagcccccgagtctctctgtgtctggcagctctcactgaggaccacacacaggccccagatgctccacctgggccttgatcctgtgctcagctccacctccctttacagcagatgccacctgctcctgcttttatgatctagctaccaatttcccatttcccttctgcgtgcaagctgtggaaaatctctcaaagaagatactagaccttttgttctaggaaagaatttatatatgcttaaaataaaattccttttactctgatggtaaaagttaacctgggccgctgtcccagactaccttgagtccttttagtttttaaatttttttttcccattcattcaggaagcatttaatgaatgtctcctggataccgagcactgtgacgtggaatcaacaagaaaggtccgtgacttcaggaagctgagatagctcacaatctagccagagaattggagataaacagacaattttaatataatatgaaagaactaggatacgtgtgtgttcagggtggtctaggagcacagaggaaaatctaatgcaatcagaaaaggcttcttggaggaggtggcccctgggattagcctggaaatatgaatagtattcactagttcagaatggggacaagacatttcagggagagggaaaggtatgaacagaggaacaaaggcaagaaatagcaatgtgtatatgtctgtgcatatgtgtttgtgtctgtgcattcataggttgtacatgtgtttgttactgcatgcatatttatgtgtgtgtacatgtgcatatgtggatgtgttattgcatgtgttcatgtgtgcaaaagtgtatttgtgtgtgcatgtctgtatgtgtgggtgtgtggatgtgatttgatttggatgtgtgtccctccaaatctcatgttgaaatgtgatctgcagtgttggaggtggagcccagtgggaggtattggatcatgagggaagattccttatgagtggcttagtgcaggggctggggactgggaccgctctgtggcctgttaggaacccgccaagcagcaggaggtgagtggtgggtgagcgagcattactgcctaagctccgcctcctgtcagatcagcagtggcattagattcttatagaagcatgaaccctattgtaaggttcacaactgcacatgcgagggatctaggctgcagatttcttatgagaatctaatgcctgatgatctgaggtgtaacagtttcatcctgaaactatccccccaccaccatccctggtctgtggaaaaattgtcttccatgaaaccaatccctggtgccaaaaaggtaggggaccactggcttagagtatcctctagttaatgagtgagttctcactcagttagttcatgcaagaactgttttttaaaactcctctctctcttgcttcctctctttcatgtgatgttctggctccctctttgccttccgccatgattgttggcttcccgagacctcaccagaagcccagcagatgctggtgccatgcttcctgtacagcctgcagaaccatgagccaaataaacctcttttctttataaattacccagcctcaggtattcctttatagcaatgcaaatgaactaatacaggatgtatgtgtgcaggtatgcatatgtgtttgtgtctatatgtgtatatgtgggtgtgtgcatgtgtgttcgtgtatttgtgtgtgcatgtgtgtttgtgtgtatgtatctgtatatgtgtacatgtgtgtatgtgttcatctgtgtgggtgtgtgtgagggcatgcatgccttcacagtgagactggcaaaggaggggtggaagcaaggaatatgagcagttctgtatttctgaatctggtggggacagatcatggagatccttgagcaccacattgagaaagctggctctgggttatttttctagcaacccactgaatgatatttagggaggtggtacctgatagaaaaggtcaggctgtaaacctggttaagcctttggaagttgtctcaagtggagctccccagaggcagcgtctgggcagggttcagaagcacagaggcagcgcctgggcagggttcagaagcatgtggtttctagagggctgctttcaggagatggaagcacagtggagcaggggatgatgccaggcagggctgtggtctcagctggagcctgctgaagcctgaccctaccaagagatctgaagggagaccccactacagagctggtcctgcctgtaggaaagggtgtggcattctgaacctggaattggtcagttactggctgcaggctgaggaagggtgatggtgaggcggtgcattgatggccaaggccaatgctccagagagaggtcagctgtgagcatttgtcaggcagcgcctgttgggagggtgcactgcctgggcaaaggggcaccaacaacatctaaaacagtgcagagtacttttgtcagttccctgagaagttctagccttttgagttgcttcaatttaatgctggttgctttaattgaaaaaaaaattatttgttcagcatcttctgggaactaataccctcaatgactatgttattattattattattattattatttgcagaatactttgcagcttccacatttgattgctaaatttttagattactgttttgcagttagttttatgcaaaaaattacttctgtagcatttcagatagaaaagagaccttcttttcaccaaagccttaaaagatattttcaagttgagtaagatgggctttgatttgatgaaacctctacctgagaagccaacaatatacagatgcagattcttccctatggggctttgatgcacagctttcctgcctgtaactcatgaggagtgaggatggggaggcggagccaatcatgaagccagtcatgaaaccagcatttggctattgttaaagagaaatgattctgacacttattaaaatggtaaggaacactttatcaagactattgcaattgggggacacagacagaactcaaatgcaaacacagcaagattgaagccaagagcagagtgaggggggttgacacctgaaaaatttcaaagaggagacatccaggtaggggaggggattcttcctaaattggcctaatgggattcttgctaaaggcacccagggacccggactttaagggtggcagatcttctctaaactcatctagcaaaattctttgctaaaactggacttgcaaggacagacaaggaaggccaaggcggaagattagtggagaagagggctccaagacgcctgcctaaggtctggccaaggaggagtctttatcaccatcgtaccccactgcagacatcccaagaatttgtctctgaaccttgaagcttggaaagcaatggggctaaaaattagtcatcacaaagttagctttgcctggagaccctggaagcttaatacgaggcagacaaaaccaaaatgaagagcagccgtgaccccactaatcttgaggaaaagcaaggctcagtcttcaagaatagcagagatgccgttgtcatctccagcatgattcagaatagtgaggcagcagggaagatgaagattgcaaggagttgaaattccgtggcatggctgttcaggtgcttaggactttaattttaaaatttcccagttttaaccctgtgttatgttctacttttaggtgcttggtgaagcagcatttacttgttaagcagagcatgggacggttgatagcaaaggggcggccctgtcttgctgtgggggaggaaacatattccaaagaccacgcagctctgttgaaaaatgccaggaaaggctcaacttgaaacaccaagaaaataatgtgttttaaataatatccacctcttcctcaaatctatttttaaaaaaacaacaacactggaaactctatctttaatcttcgattcttctggagaaattatcctcccaggttgcattagaaaagtagcttatactgcacttaggccatcagagtaagagcctgtgatggggtttatttgtggctgtctgtcacctctcaggcaaacaggcatcatcagctcggttgtagacacaaggctaggcctggcccaaatatgtggaatttaatcactgatgtttcacagtgatgcctgttactaagtgaaagaaggcagtctgaaaaggctacatgctgtacgatttcaaccacctgccactctggaaaaggcaaaacttcggagacggtaaagagatcagtagcttccaggggttggggtagagaaagggatagataggcatagcacagaggatttttgcagcagtgaaaattctctgggtgataccataatgatggatctatgtcattagccacttgttcaaacccacagaatgcactctgggggatagtgatgggtcaggttgggttttgtgtgatggaggcatggagagcagcagacgctcaacattgacaactcctggctgttgcactccgtgatgcatgctgacttttgctattttttaatggcaaaagaacatgctttggttttgttttaggaggagagggattgaaggaaccaagggtggctgtgggggagattcagaaactcaaggctagatgggacttggctggattttggagttcaagaggttaacaggactgagtttaggtaaatctgtcctctccatattgcttgatatattgtggggtgtgtgtgtgtgtgtgtgtgtgtatgtgtgtgtgtgtgaatgttaaaaaacaatcagtgtaaaatttatccatcataacaaatacacccctctggtgggggatgttgatagtgggggaggctgtgcatgggagggagtggaggatatatggggaatctctgcatgttttgttcaatttgccatgaacttgaaactgctctaaaaaagaaaaatctatttaaaaaatatatgcagtacactgtgttagtggcacatgggttgggaagagggaatactggccttggtttaggcccataggagatgtgcttccttcccatcccccatattctctcacatagacttaattactaggcctgtctttctacttgtacaatcgattctcattattccaagcagttaagttctgtaacattgccaaaaaaagaaaactgaattagtcaatactgaacttctgctcccaggagaaatctaggattatgttcctgcgagcctctggtcacaatatctttgtcagcccatcaatacataacgttgttttatgtgtgtttctgtttaaagactacttatttattatatattgttgattaattaacatggagctcacagccaacagaactatataacacatgcctgaactgagctcatcttaacacatatattttctttttctttttttaaattatactttaagttttagggtacatgtgcacaatgtgcaggttagttacatatgtatacatgtgccatgttggtgtgctgcacccattaactcgtcatttaacattaggtatatctcctaatgctatccttccccctccccccaccccacaacaggcccccgtgtgtgatgttccccttcctgtgcccatgtgttctcattgttcgattcccacctatgagtgagaacatgcggttaacacatatattttctccgcaagttacgtcacaatcttcatgcacttaggaaccccacacaacgcttcagcgctgtgcttggggccattttaaaaaatgaaatcactgacgaaaaacacaaaaatgtgaaaaacatggcatcgaacagactgtgaaaagaacacttgtttacggtagaagagctgacggaagaaggcagaacaatgcctcattgcagctcagctgggaacatactcctgctcaaattttttgccaccgtgcacatgcccataaatgaccactaaagctccttgagtgttgattttggagtttcaagtatattttatggagtaggcgaccttgcaaatactgaatttgagaatcaagaggctggaccgtctctgcttttggtccagccaagggccctgttggtccacgattgccatatcgtgttttgactgctccagggactttgatgtgactctagtttggaagatctggaacactttgggagcttgagaatgagatgagaacatcgtgtggggtttgatgagagtgttttggctccaggtcatggattcacatctcttggtgggtcgcgggaagtaaagcagcccatagcctgcaaatgttgaggcaggcttgcagcttgcgtggacacaagtccctgctcacttccctctccagttatcacaagcatccagctcagaaggacaccttgtgtgcttctctgagtgctcctgcaccctcatccctcactgaccccactctgcccaccaatactttccatttcttgaagcctgcttctgtcttgaccactggggagccttcttacatgccagaggcctctgtcttgccttggggtgtgatcatgatttactttattcaggttctgcttatccagggtggccaggaaagttcatctgtaatcccagcattccatcccatcctgccttttggaaagacgtaaaataaatgcaccaaaaataaacggaggctttgaataatatcatacattgatatgataaatttcaataagcagttttttcacatatgtcccatgcaatatatggggtgtacttatgttgaaaatgcttcattatttatttgaaatttgaatttaattggctgtcctatatttttgtttgctaaatctggtgaccgtatctccgcagagcttgcagcgcactgcccagtgctggaagtggtgtgagaatcagggaactattctgccaattagcagctgtgaggtcttggggaagtcaccacccgtttgggcctcagtcccctcatctgtgaaatggacacgatttctagtatttgcagctatgaccttttctggagaatcagagtttgggtccccattttaggtttcatattctctttccctaattggtaagttggcaatttatttatatgttcccaaagacagcttaaagtgaattcatgtatttatttctaagtaaaacttctctgttgctgagggaaaacccacccatctgggccaaaataacacgccgccttggcaggaaaataaacctgctgaaaatcgttagagcactttctccctcacctgcctgataggctctgctgcacagacaaagagcctgttctccgataaaacaaggcagctaaggggcaggtctgggctttaaatcagccctctgagggggtaggctgcatcgctgggccccacgtccataccaagttgtgctcctgtgcaccgcagaatggctcgtacgaggccgtggggaaccaggatggcaacaacaaaaaatgggttctccgcctccaggagaggcaaggcaagacctggtgacagcagccttgtctgcattctgtaattggcagcctcagacatgtgcctgtgctctccatgggggttggccagttgagccctggcaaagacgtggcctgcacctctgtgttttcacacagcacccacaccagcggtgcagggggagagtggagcttcagagggggagaaggtaaatgctgtgacgtgtttcttccagcaaccccccccttggatagcactgcccacctggtcttattctcatcagagacctacctcttctgggaagatttctcagcagctgtggtcacccagagcaggtattctctgcaggtagaaaatccacttggggttggggctgcgcactgcacctgccaaactgtgcgctccaggctctaggctctgtttttgctggccttgagctgagttccaactgggatttggaggccacaggatccctgctgagtgaagattagcaaatgctctctgagatcccaagtctctggcttgtcttaggtcgtgaacaggtgggatgggagtgtaagcatggctcagtggtccccagaaattttattttggtggaatacaggtatccatttgctcttttacgttgttccgtctaagaaatctttgacttactcttagtcacaaagatttgacttatgcaggcagctctgagctgtattttgagttaatctttgtgcatggtagaaggtacaaattgtagcttttgtttttacctgtggatatccaattgttccagcaccatttggtgaaaagattatcccttcttccctgaattgcctttgcaccttcatcaaaaatcagttgtctatttcagtgtgggcctgagtctagactctgctttcttttatatggctaactgcacgccaataccacactgtttttgttactatagttttataatagttcctaaaatcacatagcatgagcctttcaactacagcagagaattgaagccctcaaggctaaacatcatctggtccagtacccagtggtctttagaatgaaatgctgaaactagtttacatttaaagaaacagaagtataagagagggaaggggctgacccatggagctagtacataatggagaagccagctctccttcatcacaaagccttagcaaaatgccctttcaataatcaaatgatgataaaaacaaaagctgccattgttttggactaccagttaaggtgctaggcattttacacatagtatttcatgtaaccctgcatgcatttctgtgatgtagcactagtatatatgttgcagacgaggaaatggagacacagagagctgaaggaatgtgggcaaaggtgtacagctactggttggctgggctgagacacaaatacaggtggttcagggcaaagcctgtgcttcctctaaaccagcagttttccaagtgaggtccctgggcccacaacatcagcctcacctggaagcttgtgagaaagcaaattcttacccccaggtgattctgatgcagacaaatacctgagaactacgggtggaaccagtccacgtgctgcctctgctaacagggcagcatctctatgtttaaaatcccagtggacaaataaacaattgcagggactgacgtctgtggagggggcatgtggatctatggttctgtcttatggccacactccatgacaatgacttcagaggagggaggagtggatggcgaggccagtatcgcatctgcaggcaggtgaaatgcacaggctgcaggtggggaagggtggtcagagccctgggcaactgattttacctctctgcatcttctctttcctctagtgtagaatagggataagaacaatgcttaccttctaaagggactgtaaggatgggtgaaagaagtcaggaaaaggacttagcacagggtgtagccataaaaataaagactgcattgaagttgttatgtaagtccatttagatacttatttcaagaactgagcacgtagaagcccctgtgttggttttttactgactcacaggcagtgaccaattgcctggccatacagtcaggagagagggcagtgaaaacccggcctattaaaagaatgcccacaggcagcacagcgctatggaaatttgagggatgtattcaaagagaacaagtcaatgcccatcagaagagctcccttccagtttcagaaggtggctggaatagacaagaagagatccctatgtgctccctcgaggtggccgcctgtgtccatgaaatgaatggatatgggggcactcaatgcagcagtgcaaagacgggctgaatctagacatgttcctttggcaccctctcaggagcataatgccaggaagaactgctttgcttgtcaacaagggagacagagactgccactggctatggggcagattcactggtgggagggccctgcgcacagctggcgagcgggactgatgctggctgccttgggggactaaaaatgggtcttgcctggaataaacacggactctggactgggctttgtttacctgggggaaaatgaaaacgctcagagtgccaaaaaaaaaaaaatctcaacagaaggtattgcatggatttagaaggccaaacatcatttcttcagaccaaggtatactgaacagcccttgacgtccaacaaagggcagatatatcatccttagagtaacagtttgatagaggggtagaaggggcagttgaaacactggttgtctaaaacagcagtccccaaactttttggcactggggaccagtttcctggaagacagttttatcacagggggagggaggatggtttcaggatgattcaagcacattccattgattgtgcactttatttctattattactgcattataatatataataaaataattacacaactcaccataatgtagaatcagtgagagccctgagcttgttttcctgaaactagatggtcccatctggggggtgatgagggacagtgacagatcatcgggcatagattctcataagaagcacacagcctagatctcttgcgtgagcagtttgcaatagggttcccgttcctatgagaatctaatgcttctgctgatctgataggaggcagagctcagatggtcatataagtgaatacagataaagctttgctcactcaacccgccactcacctcctgctctgtagtacagttcctaacaggccatggtccatagcctgggggctggggacccctggtctaaaacatggggagataaaagcatgaaggctgccttacacaccttcactagtctgtgctcacactcaacacgtgtgggactaaaggagtgtccctactagatttttgactgtttccctggttgctctggggaagaggggttggggaggatgctggcatgaccttgcaattcttgctatgggaggaatacactggtacaacaactatgtattttttttctttctttcccaaatcatctcagaaaaatgtcttgtttttttttttctcccttacctgatgcggtggtcctagaaccagaggtgcaactgcaagttctggaagcaggaatgatttctaagcaagaaactgtcactgtgtttttaaactttgtcagaattcctaacaattctgggggtggaccgtgtctttatctcgtctggcaaaagtggggttaggactaaatacaatgcacatacacgtgcatgtatctttataatagaatgatttctgttcctttgggtatacacccagtaatgggattgctgggtcaaatggtatttctgcctctaggtctttaaggaatcaccacactgtcttccaccatggctgaggcaggaacagaagaccaacactgcgtcttctcgcttacaagtgggagctgaatgatgagaacacatggacgcatggggttgggggaacaacacacactggcggctgttaggggtggggtgtggggagggagagcatcaggaacaatagctaatggatgctgggcttaatacctaggtgatgggttgatctgtgcggcaaaccaccacggcacacgtttacctatgtaacacacctgcacgtcctgcacatgtacccctgaacttaaaaataaaacttgaagaaaataaaagaataaatacaactatatttcctggtggtagaagtggctcactagtttggaatctgtgtaaccctgtcttgaatgaatgggaacagactgaggtagaggcactcactaggctgatattgctaccagcgatctggaccagcacaatggctgaagttaatgtccctttcaaaggtggaaaagtttgggtaaaagtaaatgacaaatggaaaaaaaagaaagaataatagctgagggtaagaaatgaataaatgtgttatagattgagggaaatccagtagtaaattaacaacccttttaaagagtctcagagcaagagatgacgtcattggccagctcagttattccaggtgcctgaaagggcgaagctgtatatttaccgagacccctcctgcttttgggaactgacaagttccctgaagcacccacggagggcatggaggctccgtgcccctgcccccatacctcgccctacacgtctgtatcctttgcaatatcctttataatcaactagtatacgtttaaaaacaaaaatagaactgaccacaggctgcaggtctcccatggaattcttggtgcaggcttgggtatctctgcctggtagaactgccagatgaaatacagagaccaagttatgtttgaattttagatgaataattcttttttgtataagtatgtctcatgcaatatttgggacatacactaaatttttctttgttgatatctgaaatttaaatgtaactgatctccccttttatttgataaatctggcaactctactgcctggacagcagtggccctttgagcagaaggaattgactcctggtagtagaggaaggactctggtccccaatgtaaacctatctgtttgctttcaggatgcgggttcagaaacctttattgctgcctgtaaagactcagcatggccagggacttgcagaaggactctcacctggctccatgttgataaatttcagccacatgtaatgaaatagagagaaatggaaaagaacagggtggttaagggacctgttaaaagtgactacaatttggcccacaccagttgaaaaacaaaagcaaagaaacaagctgctttgttccagaacacaaacaaaaaaaacaaaaaaccaaaataccacgaactaaacaaagccacagacacatttcaccagaagtgtatttatttatccctctaaaatgtctttcttaatatatggctggatgttctgttttataaatctgtaattacaagtaactggtgttacaatgattataaatttgcaatatatttatttgggaattaaatggcattaattggagggtggaatagtgactacgacttaattaacctgagactatgggctctggttaaaaatccaccactaccaggtaagtgtgtgttccaggaacagtgtagcttccacatttaaaggctgtaaattattgatggcagtagtcagtgcttctgacaagcagtaaactgggagactgagtgctggaaagttggaacacatttgatccgtgtaggtggaaatgtgcagggtaaaaatagagtcgtggcaaatgcttttccagatccataagacctccagggagcaagatcatttgccagctctctccacctctgctagtatccattctccatctcttcccttcagacctccgccctgtgtccacactctggtcatcagctctcttctctggtcaaaagaagtccggatgggacgaaagaaaacaggctggagagtgaaatgggcatctgagcagaaggtggagttgaaaattcacaaagggaagcttgcacttcatcctcatctgttctcttccctccctattcaaatggggattgtgtttttaaggctgatttctttcctcctcactggaattgtcttatgtaatcctagctagtggagtagctgaacttaatttgatgggataaaaagaaatgtgcctttgtgttcttaaaaagaatgaatgtttgccatttcttatttatgaatacaataaaccaggctctactggggagagaactagaggggggagcaacagatgcccggaaaaaaaaagggcataatatttataacactgtgaatgaagcattaaaaatgggcaaattaaagcaatccctcagcagatggggcatatgtattgctagaaactcatgtgcacatgttccagcctcatctatggaactgcactgaatgccaagctatttggtgataggggaatttgatttaaagcgtatgttttctaagaattgtcatacgtgcccatgtgtgagtaaaacacaagtgaagaaaccctgaagcttctcacttctggaagccttttaatcagaaattgctctcctatgcctgccacatagggagtatcataggagaggatactatgacattctacttaaagatgtaatgtgggttacccagcaatttcactcctagatatttacccagagcaatgaagcacctgtccacaaaaagacttcttcgagaattgtgtaattgtcaatccctgcctctcttaaaaaaataaaatcaactcaaacagacatcaattgtagaatggataaacaaattgtatatgttggactattactcagcaacaaaaagaaacaaactgttgatacaatggaaaacatgatcgatgactctttaaaatgttacactacggccgggtgtggtggctcacatgtgtaatccccgcactttgggagagtgagtcgggtggatcacctgaggtcaggagttcgagatcagcctgaccaacatggcgaaaccctgtctctactaaaaatacaaaattagctgggcgtggtggcacatgcctgtaatctcagccactcgggaggctgaggaaggaggattgcttgaagccaggaggcggaggttgcactgagctgagattgcaccattgcagcccagcctgggcaacaagagcaaaactctgtctcaaaaacaaaacaaaacaaaaaaccatcatgctgagcaagtgaggccagacacatcaaataaaaacaaatctggactcactggagagactttatataaaaggattattgcagtgggggtgggaagggtattgccatagagaaaacattctatctataatgtggacacttatctcaaaggttaaggcaagcagcatttttctattatagagaggagtgaacaaggctaggaagaactgagtgagggaaagtgggggtgaaaatgttttacctgaagctagtttattctctggaggggttgtctgcaggctttggctgaggataaccaaatcttaatctttgtctaacaagtattttgttccatttgatcagtggcaacaaggagatcagccaatcatttatgaggcaaagaatgggaagttggagggtctgggtctggccttgtcctaagtaacagagaacatcatgaactgtagctaagtcctgtggggaacggtgtttcccagagcatgaaagggtggggggaattctttgaaactttgctgttttttcaggagcccagactcagctaaaattcaaccttgtcacattacaaagtacattaccatatgattccatgtatacgaaatacaaaaaaaaaaaaaaaaaaaaaaaagacgaaactaggctatagtgaaagaaaacagacggtggttgcctgaggccatccaaggagtagggactgactgcagaagggcacagggaaactactgggggtggcaggaatgttcaaaatcttgattgtggttgtcttagtccatcaggtggctgtaacagaatgctatatatcgagtggtttgtacacaacagaaacttacctcccacagctctggagactgggactcccaagatcaagatgctgtcagagtcagtgtctggtgagggcctcattccaggttcatagactgcacctattcactatgatctcacctggtgggagggacaagggagctccctggagtctctttttataagggcactaatcccactcaggagggctccccactcatgacctaatcacctcccacctcctaatatcatcaccttgggggttaggatttcaacatatacatttggagagaacacaaatattcaaaccatagcattggtgatggttgcattgtatatacatgtcccacaatttatggaaccatacatttaaaatgggtgtattttattgtatgtgaactatacctcaattgaatatattttagcaaatgtcaagtgggtagatcatagtggccatgagctcaggcatagaagctgggcaggtgtgaacttgacaagcacaaatacatcacttatgagctgtgagagagatattaggcaattgcttatcctcactaaacatcactttctccattagtgccaacctcctaagactgattagagctttaagggcatgcacctagtaagaactcaataatttcagctgttattgctgctactatcattacggtgtgtttccctttacatgcatctcttgggcaatgtgatatagtggagagacaagatttcaaggcagaatatttgggcttcaggatccttcggctcaatgtcttcaactgtaaaacaggaaaatataatcatcacagctcagctgtgttacagtgtagttatgaaaatcaaatgtgaaagtggatgtgaaaatattgataaactaaagcaacctcacaagtggaacaagctaatacatgggattaagtgtaagtttcttttttttctttctttttttttttacttattcccctagattttctggtctttttcacaaagattatggattcttcttagaatcaggaaaaaagtaatttccatttcagtaaaagatgctgtagacctggaataagtacttagatatttatttgaaaaaataggtccataagtagaggtgatgatagaatttatcttctatggagatgacttttgaaagtgaaagagtatgctatcattaattacaccagtgcaagtgtcatacactgaaatgatctggggaaattagagacaattggtcatctctatataagggacacttaagctaatactcatccacaaatgcctcttaaaaataaaaaaggtaccacctgaggaaagaggggtgtgggaggatgaagaagttggtgaatgggtccaaaaatatagctagatagaaggaataagttctagtatttgatagaaaagtagggaaattatagttaacagtaatttattacgtatttcaagataggtgaagagaagaattgaaatgttcccaacacaaagaaatgataaatgtttcaggcgatggctgtctcaattaccctgatttggtccatacacattgtatatgtgtaacaaactatggcatgtagccccaaaatatgtgtaactatgatgctatcaataaaaaatgagataactgacatcactggatctgaaaattaagaaaacatggtcttgcctttggacctgagagctcagaggcacctttgttaagcaacgtctgctcacttaaggtggagactttctaaaagctgggagcatagtcccatgactgtccccctggagaaactcacacctcccaggggactccctccccgtgaatagatgaggcttggggccctccttccatagaagaaggaggttcttctatgggagtcaagaaatcaagaagtgtggataattccatgtgtttctttagttgttaaagaaatttaagtattctactttagactgttgattaaaggttattgtttaaaaaaaccttaaaactgttttgcattttgatcatcatagtgaagactatttgaacaaagatcatcaatggatgccaaatctatggaagaacacttgcatagtctaaaaatgtctcccggccaggcacagtggcagacgcctgtaatcccagcactttgggaggccgaggtgggcggatcacgaggtcaggggttcaagaccagcctgatcaacatggtgaaatctcgcctctactaaaaaaatacaaaaattagccgggcatggtggcgctaatcccagctactcgggaggctgaggcaggagaattgcttgaacccgggaggtggaggttgcagtgagctgagatcgtgccactgcactccagcctgggtgacagagcgagactccatctcaaaaaaaaaaaaaaaaaaaaaaaagtctccctattgaccactaagtaaaagcaagagtaaaaattgtcagtgtacagcagaggttctatacaattctttgccccagagaccaaaatgagcatcctcattgaactgccgtggacactgtggcctctgatgtgatgccctgagaaggacaaatcttctccatgtagatttccattcagggaggtggtacctgaatccaagcacaaggaaacatcagagaccactttgagcaattctttagaaaatgaatggcctatagtcttcgaaaatgtcaatgtcatactacggagaggctgaggaaatagtccagattaaaaagcctgggaacacaataaatacatgctattcatgatcttaaactggatcttaaactggagggaagatttctacacagagcattttttgactattggcaaattggaatacagtctgtgtttagacaaaagatttgatcaatgttaaatttcttgaattgttacctatggttttctttttttatttttgctttattttatttatttattttttagatttccttttttttattatactttaagttctggggtacatgtgcagaacttgcagttttgtataggtatacacttgccatggtggtttgctgcacccatcaacctatcacctacattaggtatttctcctaatgctatccctccgctaggcccccaccccccgacagaccccggtgtgtgatgttcccctccctgtgtccctgtgttttcattgttcgactcccacttatgagtgagaacatgcggtgtttggttttctgttcttgtgttagtttgctgagaatgatggttcacaaacaagcaatggggaaaggattccctatttaataaatggtgttgggaagaccggctagccatatgcagaaaactgaaactggaccccttccttacgccttatacaaaaattaactgaagatggattaaagacttaaatgtaagacccaaaacgataaaaatcctagaagaaaacctaggttttctttttaaagagaatatccttgttcttaggaaatatggcttgaagtattaaaaggtaaagaggcatgatgtatgaaatttactctcaaaactttcagagaaaacaaattatgtgtgtgtgcatgtgtgtgtatacacagtcatttaccaatagactttgaaggagagagaatatgaaaaataaatgtgggcaaatattaaatattgataaatctgagtaaaacctacatgggaatagtttgtattatttttgcaactttttttgtaagttcaaaattactgtgaagtaaaaagcttttaaaaattgaggaaagatgctaagtagtgatgagtgaatgatgaccggaagcttagagacctcaggctctgattaaacccccagatgaggctgggcacagtggctcatgcctgtaatcccagcactttgggaggccgaggcagggggatcacctgaggtcagaagtttgagaccagcctggccaacatggtgaaaccccacctctactaaaaatacaaagattagcctggcatggtggcacgtgtctgtattcccagctactcaggaggctgaggcaagagaatcgcttgaacctgggaggtggaggttgccgtgagccaagatcatgccattgcactccagcctgagtgacagagtgagactccataaaaaaaaaaaaaagccccagatgaaaatggtgtagctatggggataagctaggcccagagatgctcacatgtggtttagggggacaaaggaaacatgaggatatccgtttctctttgggtgctgtgatttggactatgcagactccactggggtggcatgaggaagtattggtaaaatctggctgttcttgaaatcgagctccttggaagatcgtgataatcaagtgagagatcactgccccaccaaatttgagtacttacagttgatcacacgaaataaaaatgcccaattatgattactaaggaagagatcctatattgctggaattattgtctccccagagtcaagcgccagtgccagggtcagaatgagtactgaacaccagaagacttcctatccaaagtatttgctgagctactaggcatccaggtggtcaagaggacaatgagctaaactgatagtagcaatcaagcctctatctgcttactatgacagtgtgagcaagaggcagaaaaagaagtgccaaccacccccctccccgtgttccatttcccccatggagcagtgccaggtcaagatcagcatggacctgggcaataggaaactgcagaggagtgccagtctaaggtctactgcctctttatggacacagaggctggggagagaagggggacaaggatgttctttagccatggatcctgataaggaggttatggtagaggaccctggactaggagtgcagatatgttcatgagttgggctggccaggcagggctcaagtccctgactgcagctccctctggggactgcaatacacttgctgtataccaagactgctgtggggagggcaacttccctggagaggcctgcaaggcaaagccttgtcactgcctgtggtcggacctgaaagatcacacatgggatttgggccggagctggacttcttatgattttcgagtaagaaaacctgggctgagttggagattgccctccttcaggtgcagtgagctgagctttcttctcgtaggcacttgcttgggatctgggactgctgttggaattctcccagccagattttcccagtccatgagatcagtctgcccttgctgccggggtggggtgggggttgtctgcaggtgccttgttagctggtcagcacgctgctggctgcgcgctcctcctggcttcattttcctcttctcctgctttcagcaggacatagctggtcgtgacacttcaggaaacctggcgtttgtgtgcacttcctgagctgtttagcaccactgctcagaacccctggagctgggaccaccacctgctcttgtgggttcaagcgctcagagagagggttctaaggctctgggccagtgcaggtagaaggtgaagatcccagcttggtaaagcagagcggcacatcccgagcattttcaagatatattttaaattcactccatcgcctgtgagccagtgaaggaaaggcagaccccagccgagggcagaggcagaaacgtgattttagaaatcataagggtggtgggcaagacccacaaaaggtcacaggccaattactgctttcgagaggaggaaggatgtccttgggtaactattaaaatgcatgacacaattaaaatatggggacacatgcggcctgtgttaaaattagattatcaatactgcttagcagccttggaacctcaggcgaggcactgaagcagttagggtttcctcttctgtaattgagtgattttaactgtatctctctcataggattgttgagaggattaaaagagatgatgcttataaaaacatgagactgcttggacctattctgaatgcttaatgagatctagctgtgaaaatatgtgtctacatacatatttaataagcacacgcgcgcgcgcgcgcacacacacacacacacacacacacacacaggaatgctgtactccgtcacgtggtgaccaatggaacaaaccctctctgtcccggacctccaccgcccacggcagctgaactgggcccggggtcttgactcctcacaggcttcccctctcactggcttctcttcttgccgctcttcttttctctttgtcttctttgtaggtttctcaaatatccctttttctctttggtccttttcttatgttaacctcttgcctccttggtgtctacatttattcatttaagagtctaaaacaaggtaagaagaaaactagtttgtaacctgaaagttcttctttactgctggaaacacctgcccttgttcaaatacagcaacaggacttggttcacatggaagataggagttggaaaagggttttctaattcactctttgctggtgacttgagatccccacatcaatacactgctgaaaacagaaggaagcattagcagaaagggatgaggggtgctgctctccacccaagaggattcaggcatgttccacagccctcatcgggatgcacaggacttgacactgcactgtccacacccctgccgcgggaggctgaagtgacttccttccactcagttccagcgggctctgctctaaggcgttttctccaatctctctttctgcactggggatttctgagcacagagaaaagtttccactcctggtaaatttatggagaacttggtcccatatgataagaaatggagcctattataagttgatactaacaaaaatgggagattttgttgtttcataggaaatgtttgcaagtctaatgtcagaatgttctgtgagtgttgcaatgtagtagaataatgcacccacatgcttcttgttttttttccctcatgacaagtatgacataagatgcacttaaataaatctgtggatttatttggagaaaacatcccacatgcttgtttataaaagccataaataggaagacagaatgcagaaagaaaggagacatgaaagaaacccttatgaccctttgaattccagtaactcacttcatgcataaaagggaacttatttttattattttcttctattcttcttctttcattattctgaaacatgggtgacaaagagtccaatttgatggaatttactatagtatagaaatttaaaatctcctaaatatctttcttctcttcctatttactcagtcaccaccacagctaaagagctaattttggagttgactaaatatgacatttagttcaaaatgataacttggacatccacagttcttgttgttgcagtataacaccaagtgcagcacctattattcacagtactgtgcaaggaaaccaattattctgcagcatataaacccatgttcaatatcttcataggaatgtcatttcacatctagtgattttccaatgcagtcatgttaacctcaaaggcttatgtttgggaatgtgtttgaggcttagcagctatcattttcttgaaagtgctgatttttttttccattgccttacttaaagtatgttccagagccctgctcataatttttgacttcctgaatgtcttctctgaaactggcctgttcttcctcacacatttactgtggactgtgcacggtagctgatcaattaggactttactgaatggctgggatgggaatgtccagcaccccatgtgctagggtgactttccagacactaaatatctgctcaggagccaatcagctatagccagaagttgggagggcatcctgcatctcccagctctccccaccaattcctgttgtccttaacatggatgacacctgagtgtattggacatgggactgggtgagaaaaggaggtcagatttcaactcaagtctaaatagctggcctggaaggaagtatgacaactctgtgttaacctttttacatttatatttattactcaaaaaacttatgagtaagtttttgttattacaataagaagacttcagacaaacctgagatggagaaccagataatacagacagctggaagaaccaggcaagagtctggggcagctcacaggagggatgatgctacctcaactctgcagcatctgggatcgccagccaaagggtcggagaactgccagggagaaggtgtgagtgatgaggccctggcggtgagctccaattccagggctggggtggtccattgtaggtggctcctaggatgggctaggggctgcttccaacagtgcccttgaccagtgcaagtgtaggtggtaaaatcagcagccaattggttcacccaaggagcagctaggattccaaggttgtgcatacaccctcagtgggtggtgggcgtagaacttcccaggccttctctgcacctctaacagttatgctatcaatactatttgaagaggatgacccaactcctttctgatcaagataaatatttctaaatattgtgtttgtgtaagtgttttttaatttctgccttgtctagggaagggatgatgtgcttgtagcatgacatccccattcttccagtcaactgaacggcatcaataagtggtgatgtcactctaactgagccttagagtccttctcagcataaagctgggcagtcccttcctgttgattgtaataaaacccacttgctacctcttggcctagagaatgtaatgatatgatttgaatagctagatactgacctttccaaaacgttggcttacaacagcttcttggattgtagtattttaacagtaacttgtcggtagatattttgtcactgatgtgggcatagtttgttgcagcctactatgctactattactgcttgtattttttctcagcacacactttgtttccatagcagttctcattttccacgtgacaaaggccatggagctggccgtgtgtgtacaacacaggtcagagagctcccgttttgcttctgtgagtgtagatgggatggcccacttcatcctgaggcctttctccagtgttgtgctgtgagacccagtgggtcctcttgccttcaatgtctttgtccttgcactcaagcagagaagagttaaaataaaactataatgcctattaagaatcagcattcctattttggtcattctgctaaccgcttgacacccatcctcccatttattcttcacagtaaccttgccagataggtagtagtaacatcttcacttaacagatggagaaactgaggcttagagaggttaaacaatattcccagagttacacaatagagagcagaggcagggctggaatctagatccatttgatttcaatatccataattgtaccacgttcttaggcccagggtttttgaaaagcccatcttgggctctgagaggagaataagtaatgccatagtttgtgtgatgaatccattagggaacctgctctccatgagttttcctgggactcccagaagcaaggtggcccaaggatggtccagggcatcacctattggctgggctagaactcatacaaacagactcaaccagaactagagggtggtgagttttgtgtgatagaggcgtagaatgcagcagacactgagcattggaaacttctggctgctggcctgtgtgatgcatgtttactttgctttttttttttttttttaatgacaaaggaacatgcttttgtttgttttaggagaagagggattgaaggaaccaagggtagctgtggaggaaattaagaaacttgaggctagatggagcctcggctgggttttggagttcaagaggttaacaggactgagtttaggtaaatttgtcctctccattttgcttgaaatattgtgttgtgtgtgtgtgtgtgtgtgtgtgtgtgtgtgtgtgtggtgtgtgtgtgtgtgaatgttagaaaaataaatgtaaagttaccagtgttaatgttcataataaaagttaataactgtgaggctttaatggtccaggctcacttttattattaacatcaatttaacactctcagagaagttattagactctaacctcccctgtcattgctctcgaaataggaataaatgccattttcctctggttgttaattcagcttttagaaacagaacatcggcaagagcctgcctgtaaacaatcccaaatatatgtgatcactgcctcagctagaaaaaaataaatattaatgagaccatgtcctggccagtggtacaaatgccacgggcttcaggcagaattactatgaatgatctgaatcataagcttgtgttggaaacaaataattttactccaaacctcatcatagagattgcgaggagcattcttcattttcttttgcacgtgttgacagcctgattaagagctttgggcacttgccatagttccccatttgagagtgatccgtgcctgtctcctggggtgtttccttggtctggcagcatggggttgctatgtccctgggactggcagaactctcagggaaaagcaacttttaaaccatccagattttgctatcacccctgagctttggaaaagtctttcagtgtgagctggactgggaacctctttcatcctcaccccatcaccccatggtacccgggaatatctgctaatgtgtagtttggtgacctcagactagtatactaggtgctggtcaaaaatgaggagtggcatgcttcttctgggctatgcccgattacttttaagcttaatctgttgaaaacactggtagaatttctaggataccaagattcttggcaagcttgggaatgttttcttgctgcctcttactcctctactccaaatggtattactcgagcagatgtggcaacattaatttgaggcccctacttgagtgctttacttttcaggtgtgataggatatgagtagccttcctatagtttggagtggtggatgtagatggttttgcccagtagtgggtgttgcttcaaatgggaagtgtcctgattctggtttttacttccttggggctaaggtgttaaactcgatctcatagttccatttcatcccttgagaaggctcactgcagagccttctctgtcctacgagatgctctgtagtattaaagaaaaacctcagcacctttgccttaagcatcattgaagtgttacatgcttttcgtgtatcagagcatgtaaattaccttccagggaaaggactcatatctcagggtcacttcagtacaacagtgacaatttgctgattacagcagtttccccgaagaaagagggaagccatcactatttgtgtagcaaagattagaaagcttgagaatcataaaggcaattcggcccaggatctcctggcatgccatgtcagcttatttattagtcagggtcctccgggaagcatgtgttgagatgggattaaacttgcctgcattttgttaggagaaactatcacatgagggaagataaagagggaaccagggaaggccaggagggccattaagccttgatgcaaatctgactccatgtcaagagagaaggaggggaggctgagagaaggcacgttggactgcctgctgcagtctctggagggtcctcagggtgttgggggcccctgtgtctgccttagtgacctaaaacagtcattcgctgggagcagccctggggatgcaagtcctcctgcaaatgcagctatgatggatttcaaagcaccacatcttgagccctcagtgggtggtgttctctgtagttggagtctgccaggtgtgttccagaggctgccacagtgcacttttcttaaactagagaatgttcctccattaaatacctgctttgtgccagacaatggctatattctggcatcacggagggcggccagagggaaatgagaggagaccctgtgctctgcaatgcagaggcgtctccctgagcagcctccctctatggacgggcatttcacagacttctccaccaggaagcagcagggtgatagtgcccaggtccacaggccacaaagcccattggtattgtcaggtcctgtgcttcactgcatatgggtcaagaccacagatggtggcggctacctccagctcccatcactcaggacatggcaggcccttgccctttcccctccacagcgtcgttctcatcttcctttgacaaggcacctgcaggtattctctctcctgttcccctgccaagcttgcaacaggcggggatggactctcacacctctgtgtagtgaaaatgagaattcccatttgtcattctgattttgtccaatggcctttctagtgtctcctggtctctcctctgcttagtgaggggtcctcatgcttcttgagagatggcagctaatgtgggtgcccgagtcaggctgctaactgttggctgcatgatttatttggggtaagttatctaagttctctgtgcctcaatcccttatttgtaagaaagataacaatgtctgttgctaacacttacgactgttttgaggattaaatgtgataatacaagcaagcttttagcatagtgctcaataaatagcagttattattagattgaaccccacagaattaccatttttctaagtcaagaaatttaaattttggcagtttcatgaggtttaaccaaaaactatgggtgggcaaaactttttggtttggaaacctccttaccctctgtggggtacttggtagagcagctgaggtgagccacttttgccttcctatcaggacctggcacgtcaccctcccaaactggaagagaaggcaggtagctattaggtgggaacaaagacgttggttccatcacacctgtgttcacctcttcttcataccaatcagtgttcacaagggtgaccttggcctgaagacagcctccttgagtgtgtgctcgacccatgagaggagaaggccctctccctattcacagaccaaaataagccacatcaggatggctacttccatgttagaaatcaccattgatccatgtatttgtctgggttctccagagaaaaataatcaataggatatatatatacacacacacatataaagagacacatgcacacatatatgtatatacacacacacacacaaacacacatacaaagagaacgcgagaaagaaagatatttatacagaggcattgactcacgtgattgtggaggctgagacattttgtaatctgccctccgcaggccagaggcccagggaggccagtgatgtaagttccaatccaagcccaaaggcctgagaaccagggagccagtgctgtgattcccaccaatcaggtctgaaaactagaaaggtcaatggtgcaagacctggtctgggtctgagggcaggggacttatgtcctagctcaagcagttagacagagaaagggagagagagaatccccctttcctccacttttttgtgctatccaggcctgcagcagatgggataatgctgacccacattgaagagggccatctgcttcactcagctcatgaattcaaatgctaatttcttccagagacaccctcacagacacacctagaaataatgtttagccagatatctgggcatctcgtgacccagtcaaattgatatataactaaccaccacagtccaggtagacttacctaaggtgagtttgatttagttaagagcctatctttgtgccttctgggagaccatgggaacccttcaacgctggctatggagagaggtgctccttctgctaccaggctcaggtaggtacagcgcaggccctacaaagtgagggaggagcggtcctgaaacggtggcctgagatccccattctcacctctgctgagttgcctcatgtcacaggtactcctcgaggtcaagacatttaccacccacagccactgttaaaccactaatatgcggtgattcatgtttttacgtaggtgacagtttagtgttatggggaaaagcattggatttggagtgtggaattagtcattcctgacctggctgggtggctgtgtgtaagcattttctctccctggagcctcatccatagcaagagggttttgcagcaaagttaagatggcaaatacgtcttctctcccaaaccatccctgaccagtaaacatcaactccctggagactggaaggccctggacagcaccatcttctccagaaaagccagtgatgtaggtaccaatccaagctcaaagacttaagaaccagggagccagtgctgtaattcccagcataggaggcccagaaccagaaaggtcagtggtgcaagtcccggtctgggtctgagggcaggagatgtatgtcctagctcaagcagttaggcagagaaagagagaatccccctttcctccacttttttgtgccgttcatgcctgcaggaggtgggatgagaagtacaccttttctcccaaaccatctctgaccaatgagcatcaactctgatattgtttggctgtgtccccaccaaaatctcatcttgaattgtagcctccataattcctacatgtgatgggagggacatgatgggaggtaattaaatcctggggcccggtctttccatgctgttctcataagagtgaataagtctcatgtgatatgacggttttataaaggggagttcccctgcacattcccccttgcctgccgtcatgtaagacatccttttgctcttccttcatcttccaccacggttgtgaggcctccccagccatgtggaactgtgagtccgttaaacctctttcctttataaattactcagtctcaggtatggctttattagcagcatgagaacagaccaatacaaactccttggagactgggagggtctgcacagcaccatcctagtgcacaggttctacccaggacactgacaaatcctaagaggagggaaaaaacaaggcccttgggacacagctttaaaaaaaagagtcctattttctgtcattgccaaaggaaaaggggctctctgcagcaggagatagagccttccccctctcattcccttcaccattctgttctcttgagccatgaagcaaaaccacctgtagccaacattgaagccactgctccatctacactttcatcactttcatatattgtcccctgtctttgtcattccacctctctccctcactgctattgcctccttcatgttacttactcctgattttccttcaacgttcctgaccatttctagtcactttcttttggcttctttatctctaattactcctatatctcccaggctgaattttacacagaggacaattacatacttccagaattactctcatcagtgtcctcccattcatgaacagagcatatggccattattactaccccatgaggttcagctgttagttagcagttatgtaaaaaaattaaagagttgcactggagtaatgtcagttgagttcaccctttctttcacttttcattgtgtcatggaattggaagtaactttgaagtttatctggtccaattcctgtcattaagttgaaacttaaggagtctggtggctgggcatggtggcaggtacctataatcctgcactttggtaagctgaggtgggaggatcacttgatgttaggagtttgagaccagcctgggcaacatagcaagaccctgactctacaggaaaaaaaaaaaagagtctagtgatttgtcaaaggtccatctgcttatttagtggttgagataggattatttaacctaagtttaaactcccagctaattttttttctattttaattccaaaaccaatatccaatatgaaatcacatcatggacatctcaaaacaaactttcctttagttttcaggggtaatttcactgggaaacataaattacacgtggagcaggcagccttgtttgtgaattaattaattttttttttttttttttttttttttttgagatggagtctcgctctgtcgcccaggctggagtgcagtggcgcgatctcggctcactgcaagctccgcctcctggattcacgccattctcctgcctcagcctccccagtagctggaactacaggcgccggccaccacgcctggctaattttttcgtatttttagtagagacggggtttcaccgtgttagccaggatggtctcgatctcctgacctcatgatctgcccattttggccttccaaaatgctgggattacaggcgtgagccaccgtgcccggcctatttgtgaattaattttgcagtcacggtaagagtccctgaacttaagctttgagcttttgaaaactctggaaattgatttcaagttttattgtctttgtttccaaaacggtggattagaagcatgctgccctttcccacctactctataatccctaaaaggttgagagcagatgggacacgatggaagagggatgccacaagccaagagatggccatgcatacacgtccatagatgttagcagcatacagggtcctccttatctgagatggaagaagtcggggcaggcagagtccaggggaaacctaaggggtggtttgctggggaatgaccatggtggtcatcagccagattcactccattatgtctccccttcctgagacatttgatctctaacaatgttagagagcgacaacaggctcaataaatggaaaatcatctgcttgaggaaatggaattaatagaacaatcaggatgtataattaatacatcaaataagtaagttttaaaaaataaagtagacatcttaagaatgactgctagactgagccagcaatatttttaacaagcgctgtctgatacctagaaaataaaaccagattcttttagcttaaggaaaacaaaacaaaatgaaggaaagcaaagcaaaatagttgattttggggggtgggaggggattttaccatctcattcatttattcattcaactcatatgtcgagcacactattgtaggtgctggaatacagcaaagaaataagagaaatgtggtccctgttgtcatggagcttagagctggagaatgaaaggagagagtaaaaagagttaatcaatgaagcaacagtgaaatattgatagtggcatctgtagagactgaagtagagagatgcaatagagaagaactatgatgcctactctaaattggtcaggaaatgtaagtgacatttgaagatgaagaagaaaccaaccatgtgaaggtgaaaaaagaggaggaaccataacgctggggcttggaacctatgggagaagggaggaaggttataacattaggctggaaagactgatcggggtgagatcatggggggctttgtgaaatgagagagctcattatatcatcctcagtaagttgtcattacaccactgtgtttttgacacacatcagtgtgaaattactgttgtaaaaaaggctaacctgggtggcaataaaactcatcataggccacagacaatttgaaggaattaatttgcaggattggttaagggaagaacactactagatgagaacagaaggccctcttaatttatttaaagaacaaatggcagcttaaggtaaaagcaaaatatatgaccacagtagcaaaattagaaactactacttattgataaatactattaaggaaatgcaaaggcaaactgcagactctgagaaagtattagcaacacatatacttgacaaaggctttgtacccagagcacataaagaactcctacaaatcaatatggaaaaagccacaatccaataaaaaaatggagcaaaattcttaacagaaactccacaaaagaagatacaggaatagccaataggaatatgaaaagatgctcaacaacattagtcactaggaaaatgcaaattaaaaccacaagatgcaatttcacaccctctagaattagctaaaattaaaaagattgataacatcaaatgtttgtgaggatgcagagcaactgcaactctcatacacagctgatggtagcctaagatgacacaaccactttggaaactgtttgacagcttttcacaaagttaactatatacctcctcctccttcttcttcttctttgttttttttttgtgtgtgtttttgttttgttttgttttttgaggcagagtttccctctgtcactcaggctggagtacagtggcatggtcatgggtcactgcagcctctacctccccaggctcaggtgatcctcccatgtcagcctcccaagtagccgggactaaacacgtgcaccgccatgcctggctaatttttgtattttttgtagagactgggtttcgtcacgttgcccaggctggtcttgaacacctgggctcgagcagtcctcctgctgtggcctcacaaagtgctgggattacagacatgagccactgcacctggtctatacaccttcttaatgacctatctattctattccaaggtatagcccaagacaaatgaaaatgaaaatatttgtccacaaaatgtcttgcataagaatatttataggaggttactcatgccagtcaaacactgaaaataatccgtgtaatcattgaagggaaaattactaaaaatttaattaataaagggaaaattgtggtatacacacaaaagtgtttgtcactgatacaggtaacagcataagagaatccataaaacattgcgttgcgtataaagaagctagtcacaaagaatatacacagcataatttaattgatgtgacaggaaagaacaggcaacactaacttaggctgatagaaatcagaacaatggttgctcttgggagtggggactcagtagaggtttctgagtgatggaaaagctttccaccttgatgatcttaatcatggtgggagttgtgtgggtgcatacatctttcaaaattcaccaaactatatacttaagatatgtgccttttactgtttgccaattttgctccaattagaaaagttggggaggtataggaggaaagagattagcaacaatgagaatagtttgctccttgaaggagttttacttggaagggaaaagggaaaaggaatggtagaatggtgactggaggggaaggaaggttcagagttttgtttgtttgcctgtttcttagacgggagaggtaatagcatgtatgtttgctgatgagaaagattagcaacagagagaaaaaataaatggttcaggagaaagtgagcagatgtacaagagggaggtccttgactagggaggagggaagggatcaggaatgcaagtagggcactggcctttgctaggcattgggaagggttcctctggaataagagagatggcattctaaatgggcactgatgcaggattactatccaatcatttaaaatgaggccagtttgcaacactgagttttcctccactcttatgcagccctgccagtgtaggtgggcaatgagcgtagacttgggttttaatagtgttttggttttgccaagttagcaatactaagttagaaggggagagggaaattgatgaagttattatcttgattgaccatagactgcaagttggcttaagatgttggtaaggacgaaacgatggtaagggataggaaaaagtagaatttgcgtggttgatcctgttggtgctgaagaagtcggaactgagttagtgcaagaaagatgttgggaaatgtgaggtagtgctgggaaagtgaaatgcctgaaaccaaacaaaataaaatgattgaggatgacaaggtctaggaaggaagaggttgagagaaagtgaaggtaaaatctttgcaagagaggaggtcagggaatggagaagacagaatactggaagatttatctcatggatattgaaacctcgaattgttgatatcctcagtagtgttgatgaacatgtcagtaaactaggagctaaatctccaaggaatgagcggcagtgaatgggagtcggtcaaggatgatgaccagcagggcaggaaagtggtgtattctgatgacgtgaaactcagtgctggtgttttgatggagggaaagaaagtctgctctggagggagagagggaacactgtgtcaaatgctgcagagagatcacacttgcctccaggccagggctgcagaagagaagacactaccagcaaagctgcaagaagagtacacagaagaaaatgaatgatctacatgtactgatgtagaaagacgttagagacatactgttaaatgggggaaaagcaagttacaaaatggttctgtctgcatgaattgtttggtcagttacaaatgagtggaaaattaatggtaagtctccaaactataattgcagtcatctctgcatggcagcaatggggggaacttttatgtctgattttcccacattttgctatacctaacaggacagagtgagtgcccattctggaccagagtgactagattatattctcacacctgccatctgaatggtcatggccaaattctgagcttccctaaatctcagttgtttcatctataaattaggaataagtaatatctacttatgttaattgtgagggtgatgtaagaaatcatgtgaaatatcacaatacgacacttagaaggtaaaagataaaagaacaattgttatccttactattgtattttatataacaggcatagattgcttttctatttagaaaaaaaaaaaaaaaaccgggatttttttttaaaggaacttagttagaacacaggcccagaggaatgatcacccccagttccacacacaaataactagaattaataaaagaacaaatgggatgggtgacggtggtggagagctgatggattcctctgaatagtaattgatttgaatctaaaaccaatgaacagattcttatcacttcacagggagccagcgagccagctgtttttcaagacggtgttttattttgactttcatacactcctcgtgtatcttgtctgcagaaagttatctcttgtgctgtgggaagtaggggccctgagctcctcgacctgctgaccccctccctgcgaaataaccaggtgtgtggcaggattctcaaccatgcagaggagatgggtgctgaagtgagggccaaaatgtggaaactctttttttttttttttttttttgagacggagtctcgctctgtcgcccaggctggagtgcagtggcgcgatctcggctcactgcaagctccgcctcccgggttcacaccattctcctgcctcagcctcccgagtagctgggactacaggcacccgccaccacgcccggctaattttttgtattttttaagtagagacggggtttcaccatgttagccaggatggtctcaatctcctgacctcgtgatccgcccgcctcggcctcccaaagtgctgggattacaggtgtgagccagcgcgcctggccaaatgtggaaactcttatccttagattccacctggttgcaagaggggccaaagaaaggcatcttggcggctaagcaggagtcgaggtgaaatcattgatggaacagactaagctatactgatatttagacccaagttcgttaaacaacaacaagatgcttgcttttcagccccaccttttgacttcctaaaataagaaaagaatccctttccattttccatttcaaaccacagtgagtaatggcatctttgagcgctggggcctagaggaaattctatttgtgggataaattaggaatattaaagaactctcacctctggggtactgaatcaaaatttcaattgtgtactcaagcttaaagctttagacctaggcaaacccctcccaaccccgtctttgtcgtttcccccttgtgggaagtctggtctgtggtcgttgtctttgaatcatgcaaattaggagagcatgtgtgaagtccttttataatttagattctgtgcatgtagctcattggccatcaggaagggtatctcaattcagatggtcacttgggaggggggctggatggaaaagagaaattctcaatatatgaaaatggtttgaaatagtaatttccctcaaaattctctttctctacttgtatgtctgtcctctacaatggagcagacccgtaatccccaatcactcccataactcaccttcctggggctgtggcatgtgcagtggtgtgttgtttatacagcctgtgtgtttgtactgtgctgtcccacatggaggcctccatctgaatacaagggctgtgagcatttaacctggcgcagggtatagtacacctggctcgtggattttgaataaaagtctctcatcactctttctgatttacacttagaagccatttttcttaagccctttatgttgctaaatgcatttccttacccctcttcagcctgaacacctttgggcaaacacataatgtccctttcttctactcttggaaggagctatgaatcagaaggaagtgggatttccttcccgggttaaactaccaacataggtcacacttatatgcttgcttgcctctgattcttaagaacatcaaactcatgcctcactgggctaataaaagtttatttttctttacttatgtgcctcttggtgtatttttctctagtgaggtttagatctgcaccttgtattcaatgaaaatattattatagaagaaatactattaaataaggtaattttagatgatgttattaatattagaacaattttagactaatgtcaactatcagcttgtaaagtttgagcttttttctctttgtcccctccttcctttccctctctccccacctcctttccttccttccttccccttcccttccttttccttccttcctcccttcctccctcccttccttcctttcccagcccttccttttccttacttcctccctccctcccttcctaccttccttccttccttcctccccctccctcctttccttccttccttccctccttccttccttctcttccctctccttctttccctccttccttccttctttccttcctccttaccttcctctagatttcttttttagaaagagttagaaatatattttacacaaaatatcagacaactccaggatcttcttttggtattatttatcattttagatagaggggtattgcctgtcaaagatttgacaaaatctttgacaggcaatacccctctatctaaaatgatatatgcctagatgcagaaacagacgcatggaatgccattgtatgacttcacaacagaattagtatgctggcttcctgacttgatattcctgcctttgattcttcttccctgtaggttgccaagtactcagcagtactgaactctctaaatgaccagtttcatgaaaatctcaaagctcccttcaggggaatcctcactgtaaaggatgaagtgggaagtcttcctttcatctaagacttgcaaagatctgacatcttcctgtccaaccttatgttccaggattgctttgtctcgaagcaaagatgggctcaacattgttttcaaccaccagctacattttctaactccaaacatttactttcccacctcctgggatgcctttcttcctgtcccacacaaatccaactcacccctgacgttcagccccagtgccccattttccagagagccttttctcatagcttcagttcccactgactcactttactgacattccttcagtgtgtctcacttaaaatacccccaggtatggaactcagaactcataaaacttagtgtctacattgacctcgacctgccctcactattccactgtcttcgtcaccaaactttattatgccagaaaacttgtgcccaggagattaaacattgcaaataagtctatttgcaggatgttcagtaatttcctgagaaaaattaaataaacatcaaacagacttaaaaatttatttattcattcatttatgttttagagaggtgttgctctgttgcctaggttggcctcaaactcctgggctcaagcaatcctcctgcctcagcctcccaagtagctgggactacaggcgtgcccccccttgcccagtaaaactgttaaacattttaatagatagcatcaaacaagtgtttatgcttttgtgtccacgaattctaggctattataagatgataattttcccagccctaataaacacttctcttctttaaaatgttcaccttcaagcaaaccctatacctcataaatatccctttcctttccaagacactgctcagactctgttgtgatggtggtctttcttaccggggtgagtagtatactcagcttggtctcactagtacattgttttggcggttttattttttttgagggtgtggtgaggattccacaagtacaaaataaatctctttgttgtggttacctgagtaaacaagatggacctggcactcaaatttggcttggatgtcaagtctgatgaagctgcacccccctgtaaagagggtgtgatgaggtttattactcacataatgaggtttccttggagagtagggtgggctcctaagcaggtctgacaatggcttgagaatgcagagacatgaggctggctggacttttgtggtggttagtggatggggctgggatgagggttcccatacttgggaacgttcatagactagagctcatgcagtttgagctacccataggtgcagaaggaggaagcacttgggctttcttagtttgtcccaatgcgagaaaaggggtagagggaggagggtcctgaaagctgttgtcagttaacaaatggactcagactctgtataacacccctaatcacccctcccatttaccccctcctccacccgttccctgcagcatctcaagaatcccatgaatactctatccacacatgccaagggtattgagggaatacaagcattaaaagttgttattgtcaatcaagaaaaatgaccagacaagtgtcaatcattttaggaggtttatttgtcaaagataaggatgcgcgcctgggagacaggtctatgcctttctccgaagataattttgagggctgcaaatttaaaggggaaagggcaggatattaagaagtacacagttttcatgtaagagaggggtggggaaaaatagtcattcatgcttttgtctggcttagcgaaactgcatttttttacataagatgatatagacaaatggagcagaggaaaaatgcagggaatctgcattttacataagataacatagacaaaatggggcaggggaataatcagatatgcatttgtgtctggtggacggcaggggtgatggctgcacctgtaaagacaagctatcaattggcattgccatggtgaaattttacagaagcaccttagagtaaagattttgcagctcactaggaatttccttgagggcaaaaatataggggaggtgtgcagcttttcatcttgtagccatcttatttaggaagcaaaaagggggagtcaggtttgtgtaacccagttcccagcttgacttttctttcaggcttaatgaatttggggtcccaagatttaattttctttcacattatactcaatgttcatgagaactccatacaaatattagtatgtagtgctaattttaaaaacaaaacagtgaattatgcttcagtggaagaccctaaggtgagccccattgaactatcttctgatctccatgcccttagatgatcctctctctgtgagtgacaggaggacctacaacttctttctagccaatagaataaggcaaaggtcaaggtattttgcataagcaattaagatctcaaatcagttgattataaaattggaaggaaggttattattgatgggcttgacctaattggtgaaaacccttaaaagaggggctcagctctccctgagagagagggcagctcctgttgctggctctaaagataagatgtcatgttgtgagggagtatacggggaaggccatatggcagggaactggggggccactgggacctgagattgactcctggctgacactcagcaagaaattggggagcttaatcacaatcgcaagaagataaaatttgccaacaacttgggttgttggattcttcctggtcaagcctccagatgagaacgcagcccagccaacaccttgatttcagcccaaaaagacactaagcagggaactcagctaagccatgcctgaaatcctgaccctcaggaactgtgaactaataaatgtatgttgtttaaagccatgaagtttgtaataacttgttatgcagttgtagataactaatacatatgcattgaagtaataatttattctctcaagataaagaatggaaagttgctattttaaattgctttaagaagataagaataagggaagttagtgtacttggtgtacttaagtgtatataaaagagtgtccttattattaaaacaaaatgaattgggctgctgctttggtaccttgtgcatttcacttcataagagatacagtctctcctgatcagattttcctttggtgctcaagtcctcattaccttgcctgcaaggcaggcagatgggagagtctggccttccgacttggctcacagatgtcacaaatattatctcgatgtaataaaagactcattccaattatacactgagtattggatccattccagcctcatgactttccaaattgtctgtatcagatcacaactcctaagaaccatttccagctatatggcactataaaacataacctaaattaacttggccaatggcttcataccctctagatggatattgctagcaaatatttgcacaagtcattactacccattttgtgtgtttagacagcgtatctctcatttctccctgtaattagcattttatataaatgcagccttttctctgttctagggcacagccttccaagcaggggctcaggcagtcatttgtcttgtacttgtttatggggtgggtgacttgcctgaggctgccctccaggttgcctaaggcagtaaacatgtatcctggaataaaccacaactaacatttttctttctcgtaaaattccctctaactgcttggggaaatcgtaagtgcttcctctttcagctttgtttgtagtttgtaaggacaacacccttatcaacctgcctggcactattgtgatggctgccacatgaaaacatagcttagagcttcctttgccatctatctatgtatctgtctatgtatgtatgtatgtatgtatgtatgcatgcatgcgtgtgtgtgtgtatgtatgtatgtatgtatgtatgtatctatctatctatctatctatctatctatctatctatctatctgtcatctccttactcatttaacagaatcatttctagagaaggtatagggaagaatacatgttcaataaagttacgagtgatccaaagccttctttgtgaaaaagcctattttgcaacaatttattctcactccctactctgtgtgaagctctttggtatctttattggtttgctagggctgccataacaaaataccacagactgggtagcctcaacgacagatgtgtattttctcaggctggaggctgggagtctgagatcaagatgtcatcagaattgatttcccctgaggcctctctcctcttggcttgtagatggacactttcttttggtgtcctcacagggtctttcctctgtgcatatctgtctgtgtcctaatctcctcttttttttttttgacagagtctagctctgttgcccaggctagagtgcaatggcacaatctcggctcactgcagcctccgcctactgggttcaagcgattctcctgcttcagcctcccgagtagctgggattacaggtgcctgccaccacacctggctaattttttgtatttttagtagagatgggtttcaccatgttggccaggctggtctcaaactcctgacctcatgatctgctcaccttggccacccaaaatgctgggattacaggcatgagccacagtacccggctgctaatctcctcttcttataaggacactagacagattggtttatagcccacccttattgttaggcctctgagcccaagcctgcatgtatatattcagatggcctgagccaactgaagaaccacaaaagaagtgaaaatggctcattcctgccttaactgatggcattaccttgtgaaactccttctcctggacaatgagtctcagaagctcccccactgagcaccttgtgacccctgcccttgcccgccagagaacaaccccctctgactgtaattttgtactacttacccaaatcctataaaactgccccacccccatctccctttgctgactctcttttcggactcagcccgcctgcacccaggtggttaaaaagctttattgctcacaccaagcctgtttggtggtctcttcacatggatgggcgtgacacttatgacctcatttcaccttaatcaccttgttaaaggttctatctccaaatacagtcacatgctgagcttctgaaggttaggacatcaacattttgggcataatttagcccattgcaacattccctctgggaatgcaacttcaccagtgcaatacagattgatgtgaagacagacgagcctctggaaatgtctgaaaagatagatgcagaattggcctccagacgctaccaaagtcttccttagacaatgaatcaaggatggcccatgcccattccctagaattttaatcaatggagacagagccagtgccagtttccacaaagacccaaggagaggcaatggaaacttggaattcaagttttcctccagggtatttccgaggtgggttagtggtccagaagttaggaagaccgtcactctctcatggtggatggagttctcacaaggaaatgtagacagaacacaggaccaagacaggggccaaccctgtgctccagcacttgtgcagagtcatggagttgaggcaccagccattcaagaggccatggacagaaacaaccagactaccagaaagtgggggagcaaaaatactctagtgagacatggtattatatgctgaaaatacaaccaaatagagtgtggttgtatttggagatgggacctctaaggaagtaattaaggttaagtgaggtcattggggtggagtcctgatccaataggagtagcgtatttttaaaaaatatgccagatctctttctctttccatgtgcacacattggggagaggtcttgtgaggacacagcaagaaggtggctctctgcaagccacaaagacagccctcatcaggaaccaaattggtcggcacctggaccttggacttcccagccaccagaactgtgagagataatgtccattgttcaggccacgtcgtgtgtggtactttgttatggcagcaggagcaaactaaaacacacggtgagagaacaaccccactgatacctggggaggctcactgaggagtccaggtcagcaggcctggacccttgaccctggcaagccatgcctccctctctgcagttaataagaaacttcactttgcttgattaacaggtaattctggtggtttttctggagagatggctgttgatacactccaaaattagcttccaatgaaaaactaaagcctcgaatcgcttcttgactctattttctacctgtacactttggcagagtatgagaaatcatgtaggaaatatcagaaatgccaagtacctctcctcttggcttctttggctctgttgctgcagacagagcaaagggcatcagttcatgccatcaggtgccccctgatatccttagactttctgcatgtcctactcttagcccctcagcatttatgcctagcactgaagtactcagcaggtggaggcacctgttagcacatgcttaccatggtttgagggcaagtctgctctgcgagaaggtttggcctgcctgggtccctgagagctaatctcagaaagtgagggttagccaaatggaggcagggcaaagcccactttttgtttcctttgctgttctcagtggcctcagaggaggtgtgagtctgctagccattgtgcactcccctgactcacctctgagttccggccccctgtgacctaggaccctccttaagtcacaaactgtcttggacatccactttcagtgatgtttttcacagagatcaaatgatttattaattccattagcactcattaatttaaaagagaaagaggaaggaaggaaggaaggagaaagaaaagaaaaagaaagaagaaaggaaggagaacaagaagattctcccgtaattttatatgaattaggatgctttttggctgtagataaaaaatccaactaaatgtggtttcaacaagtaaggatatttactatctctggtaggagaagtttgaagaaaagcggttcagtggatcagagatgcttataaggctggagtttagcatctttctcctctgtcaacctcagagtgccaggaacattgtcccccatgtctgccagatggctgtcctcaaatgacagtgtctgaaagtaggaaggtggctgtggggacataatccctcttcctcccaccccccgatttctgggttcctgtaaaaagccccagccaccaaagattcttcacataccaggagaatcagatctgtagctttttgtttagttagttgttgttttccaaggggatagtaaaatttctcttctctctccaaagggtcaaatagtcacaacccagagtaggaacccaagttaagcctcctaggtgctatgctaggaaaacctaaaggctatcttcctgcatatttacatttcaagggagactgaagccagagacacttgcaggtcttggattataaatcattctactataaagacacatacacacctatgtttattgcagcgctgttcacattagcaaagacttggaaccaacccaaatgcccatcaatgatagactggttaaagaaaatgtggcacatatacaccgtggaatactatgcagcaataaaaaaaagatgagctcatgtcctttgcagggacatggatgaagctggaaaccatcattcgcagcaaactaacacaggaacagaaaaccaaacacacttatgttctcactcataagtgggagttgaacaatggaaacacatggacacagagaagggaacatcacacaccaggacctgtcgggaggtggggggctaggggagggatagcattaagagaaatacctaatatagatgacaggttgatgggtgcagcaaaccaccatggcatgtctagatgtatgtaacaaacctgcacattctgcacatgtatcccaggacttaaagtatatatatatttaaaaaacctaaagaaatctgaaaaaaatatagactttagttaaaaataatgtattaataagggggaccactatactcacacatactctcacacttgtgcacactgacacccacttctacattgtcacagtctctcacactcttacttccacacccttacacatgcacattcacacacacatctctctctcacacacacacacacatacacacacccacacctggatagatttctagaagagaacaaaattaacacctccctgttgttgaaaataaaattctattctggcagccgaatataaaatttattcacggatgtgaattgtgtctatcatctcccaagacctctaggttttgtttttcagtcctcactgctattgttaaatcatgtctcccacatgaaattcatggaggtagttgggtttttgaacttctgggcaggacatccatcctctcccttctcccatcgcctttagctggcttcttcatctctcccctgtgtttagactcaaattcatctattaagttacaacttcttttgtatttctagctggtatttataacatcacatgctgtaatgattgttcaccagctctccatgggctcatctagacagagccccgatccacgtgaaagttgcagataccaggatgaaattgcttggtcagaccctgccaaaataggacagggaaggcgtgaaggagaggaggcttatgtgtctgagataaatactgcttctaaggacttgctaaaaatcccataagaaaccatttcacgtccttcacgaatctctggccttgacaaggtttaccaccagacattctttaggactgcagtgatccagatgagatgctcttgaaagaacacttgcccagtgacagcatctttaccaatgaactgacaacaactggctttgagcctctggaccaatggactctgtttctaagcagcttatgtggacctctctcttttgctaataaaatcttccctttgccttccctcacgggaggcactggcagtttaccatcctatgcattctatgttataatcctcatttctcactcccgcataaactccatatatttggagataattttcttcactgtcttttttttttcaggctgacacccatgcgctgaaagaggaaataatggatgtcagtttcaggcccaggcctctaagagctggagcctcatcttctggtttctctcccacagtgaccgtggatgccttttctcccaaaaagggcagctctcgaaggcctgagtcctggtttaactaatacaatttctcaatattgaataattacgtgtctctatagtcaagttcaagaaaatgctttatattgagcctcactgcttgtcagcatatatctcatcttttaaaatttatataatgtgattttgtcttagtagactattttaaattaacattgatatttaataccaaagggtagcatttccctctcaaaactgaaaatatttctggtagaagagttgaacaaatgtgatttcttagatttatttttggatcacctccaattaaattttacttaacatttttggctgtctataaaagtcataaattaccaaaactctagaattaacttctttcaggtgcaattatgattcatcagtaaaaatgcttcattttaatgtttcctagattgcttatcaacacatcaaacatcccattggtttgagataatctattattacgtcatgtattgggaaacttgggcaacagggtgatgatttcctatgttctccaatcattggatgatattctttcatctaaagaattgctctttacatagtttgaggaaaaaccagaaagaaatgaaataaatattatatatatgtgtgtgtgtgtgtgtatatatatatatataaaatccaaagttttatcataatatttacttgtgggttgtatatacacagtcctctcttttatacacagctatcaaatatgataataaaactgaatttgctgaattgattgggtaggataaaaatatgagaaaaataaacaatgacttccattggttgtctttgaatttcttcattgtgccattatattatggctgaacatgggtctggactagtattttggaatattcaactttgtatgcatacagcagagaactatatttctatcttcctgtgttggagtgaattaataaccttatcaggtaaagtaagaaaaaatggaaacttactgagtgtttattaattactctgtatttatgagctcaattttctccattaaatcatttggctctgcagtcagtttatccccatattgggtattcttgttccaaacccttctgatgttctacctacccacctgccatttatggattctccatggctgctttcctgctgcaatggcagagttgatcctacagagatcatcttgtctgcaaatcctaaaatatttactatttggctcttaacataaaatatttgccaactcctggtttagataaacttcatgaagtctgaaatggaaattggtattattagagtaactctatgtcctagttttcatgagatgacacgaaacctcccttcacttccatgaatctcaatccaaaacaaatgatgttacttgcaatggaatgtgttgatcccaattcattcaactttattcacattgagcaaggagatatgtgtctaattacgattgcgatgaataccatgcaaaccgtcaaaaacatacaacaaaaatatcatcagatagtagtgaatgttttaggtttaatcctgtgtccatctgggaccagaacggggagaaggaacttcaatgcacattcttggaaacaggttttgaatgttgctgagtcataaggcaggtcacttcattctgcctttgctggagaacagagggcattgccaagaagctctcagcagcctcctttacatctcccatacaaacttagcctgataaaaatggcccaattcccacatttacactctaccacttttcagctttctttttccctatgaaataagagcaatgatttttttttgctactgctttaaaaatgattcttgtgaaaaactctaaaacaaaataatttttcttccttttaatgtcatttctaaattatgatcactcacttcatattattctggatataagtaaagcgtatgaatttaaaaaggggcctggaaaaccaggagaagttcccgagactttagccaccttgatagaagggacagacaactgggttcaggaggccagagcttgtcaagctggagggaaatgacttccttctatcttctgctgcctgaggaaaccctgtgagtacgggcatggagtgctgggtttaaggaaaaaccagcctgaagggcactgtctgggaaggatgggaaataatacctaagggtggctggggaactctaatcttggaagttatatcaaaagaggacaacaaccatctgccttggaagttttaggtgcaggttttcttccagttggggaagggattggggtgtgggggcactttccctctggtggttttgtagtaaacctttccaaatggacccaactacttagatgtatggacctattaacaagaaggcatagatactcttcggctcataaccagtggaaaggcatggttcctgtattggaagcatctactactggagtgaaattaactcctagtctgttagttttccagagctgctgtaacaagtctccacaactggatggtacaaaataatggaaatttattctcttacagctctggaggttagaagtccaaaattaaggtgtcagcagggtgggtcccgttttggaggtgctgagggagaatccattccctgcctctctcccagcctctgatggttgcttcaatccttggcattccctggtttgtcagtgctgatgcattcaatctctacctctgtcttcacatcacattctcctccctgtggatgtgcatgtgtcccaatttccttctcataaagacaccagtcagtggagtagggcccaccataatctgggatgacctcctctaacattatacctgcaaagaccctcttttgaaataaggttacattcacaggtactgagaagatctgggaggagaggcactgcggtgagcacctgtgggctgtcccaggacctgtgattgctctaagctgtgtaggatccacacagataccaagccataagtcagctctccaggtgaagcattcaaggagtgaacaaaagaatggctgatttagaaacgctgaccagtgcagtgaaggtcagctttcctagtaaagcctgatgggacaacataaagagaatcactgtagcctagcccctcacaaaagaaagactggccttaaatttaaaggctaatttaaagtcgtggacctagaagccagtgtcagctcaggtttatcgcttactaactatggctactggaaaggagttggtggaaatctaccccaggcaactcacttcacagatggaatgaatgtagagaaaggccacactgctggacttcagcaggactgggacctctgattcaagactaagctaattcttctctcccctatctactttcatgaggaagggctggagagaccgtgaagtcaaaacttctgcttaataatgcacattgtgattcttagggtaaaatgatagcaaggcagtattattatttttaaagctgaaaagcaaaaaatgcagtcaaaatattcaacataacaaatgcaaaccaagcaagcaacaaacaaaaaactcaacaactcaccagttcctttcttggcctcatcactaacagagtttaactgtactaaagtcaaatgatgtttgaaaaactagattcccccagatgggctggcaagtgatcagagcctgagggtgtcacctcgacgcttgaattggactggacctgttgatcacactgccctttcctcatctgaaaagcaggcctggagaggtggtggcccccacagggcttttgtgaggatagaatgagttacacaccaagtcttcgaacagtgcatggtacctaacgaatacttatcatggtattgtgattaagtggaacatctctttgtatttcccacatatgcaagagtccattttaaaagaatttctacccacacttcttttatcacatttgttcatgtttcatgttgtaaacataatatttgcttttggaggaaaatgtagaaaacgtgaatgtaaaaaaaaatcatggattgacattattctcttggttgtattttatttccatctctgaaaaaatgcatacaccattattatttttataaaattaagattatatgactgctttgcatgcttatttttaaatttggtattatgttttgaaaaattttctaggtcattaaatacttttggaaatcagcatgatttgaaacacagagagagaactccatgtgaagatgaaggtagagattgaggtgacacagctacaagccaaggaacaccgaagagtgccagcaaccactggacgctatgggagggcctggaggaggttctctcccatgacctcagaaggaaccagacccgcctggtctcagacttctggccttgagagctattttgattcaaggctaaaagaacatcaaaggagcacttgaacaccatcacaatagagcctgctaaaagctaaatgaattggacatcaaggtagtctcatatgttaatgacagtgacttcggctatcatgggtgacacattcattttccagcacacaccgactgtattaggctgttttcacaccgctataaggaactacctgagactgtgtaatttataaagaaaagaggtttaattgacttacactttcacatggctggggaggcctcaggaaacttacactgatggtggaccgcgaaggggaagcaaggcacgtcttatacgggggcaggagagagagagagagtggtgggggaagggccacggttttaaaccatcagatcttctgataactcactcactatcacaacaacagcaaggtagattattccttgctggctttgagacagggattgttatcagctcccatagaccccctgtgttcctggctcatatagctcctccatcttcaaaacagcaatgattatggaggccgtctcatacttccagtttctctgacttctgtcaccagctggagaaagctgtctgcttttaagggctggtgggattgcattagtctcattgggtcacccaagataatcttccaattttaagcccaactctgccatgtaacagcacatggtacagttctgtattcacaggatgtgtgactgtacctcatcatatgcacatattctggggagtagggtaggaaatccttgggagtcccatttggaaattctgcctacaataacatccaaatgaaatttgtcattttatcttacttcttctgctttaattggttctatttctcagtaataatcttatccatctgcattctaacattttccacccactttttgattttatacttatcagacatgatgggattagtgttgcttctaaggcactcaaaactgaactgaactcagcaaacgaattataaaccaaaaatcgatctgatgatcatgactatcactgcttgatacatttgccaacaatgtctttaggggaggacaaattaataagcttgagctctgaggtttaaatttttctatttaattttgaagattccttaggttgaaagtttatacacaggataaaataccattttcccagaatgcctgggatctgacctgccccagattaattgacatttccagattttggtaactataaccaaaataatgaatttatttgatgctgttacccacaaaatcatattacctaaggggcattgtctgtcaagatcatgagatgagcccatcttgacatccccaattgaaggtggcttcgtcatatgccatacattgtagaaaaatgttttgcatttgtgatcaagccatgcttttcccgaatgcatgattataaaaatatcttatgaagtatttctagtggttcaatgcatttgtgttggctcccagggagagaagagcttctgtataaacagccatcacaacttcaccatcagtgagcagatttacagaagaggaaacataaatgactaattcacataaagtgttcagcctcactcaaattgagatataattttatgcatgattttaatgccatcttacataatatattcttgtccatttttcattgggttgtaaccattttatatattcagagtcttaacattttaatggtaatatttctgatatacatcttttctcattttgttatttaatattttgttagctttttgacatatggatatttcacatttttatgaatttctttttcatttgtgacttctctcattattttttatgctcagaaggttgctttttcatctcaagatcaaactcatttttctccaggctttttcattattgactttttttttttaatccaccaggaatttgctttggagtatagtattaagttgaggctctaatatttttctctaaatatttaatcagttattctaaactacttcaaataatgatttttctttttgccattattgttatgccatcttacataataaactgaattctcatgtatatattcaggactgtcccagggtgtctattatgttccattgttctgtctgctcactctttagccagaaccattatttctgaaattgctataactttataaatattctcaaatacctgataaaatattagaaccattcttcactaaaattatttttcaaaaaactttgttatttttcaagacaaatttgagaattcgattttaagttccatcttcataatgtcactgcattgaacatttaattaatttgagagaattgctatctttcccatatctagtctttccatccagaaacataaagaatcaatataatgacgtaagtgtttttacatccttccataaagtttaaaaattttcctcatatggcttccacacacttcttattaatttgtattaatagatttctcattaattatcttgttgcaatggtgactgaaatctttcccaaccatgtttttaaattggttgttaatgatatgtagaaaataattaattttagaaatttattttgtatcacgtgcttactatttacatgccttgttctttattgacagaagaaagagaataatttcagctcttgaattaatgaagaaatagccctgtagatttgccactataggatgtttctgtttttagtcagacttatcctcataaatgctacctaattgtctaatttcaaatactcgtatattcccgcaccctggcgtttattaaactgccaccgccagctttttgtttgtttgtttgttttggtatctgtggtgggctaaataacaatctttaaagatatccctgtcccaatacctgggacttgcaaatatgttacctgacatggtgagacagattttgcagatgtgattgaattaaggatcctgaaatgggagggccttggggatttctagggtaggagcaatgtactcacaaggatcctaataacaaaattatgagtattatatttaagggaagggtaacaggtggtgaagtcatgctttgagaataaaactgacctggaagcctgactctgggcttcggttgctgcatttctccgcttggtcattgtcacaaacccattccttccacacaagtgatggagagactcagcctgggacatgctgggtcctgcgagattctgcacccattctcggtggcagcagcggcttcggaggctagtgccaggctcatatctcagtgcccttccacatcagtaatctctgattagtgggtctgtttctagggggcctcagtgtggaaggaaggtcacccgttacatccctggtccctcctcagtagtctcaagggattctatcctggttccaagcactcccaaatctgtacaaggaaactccgtgggtgaggggactcaggtcacttggcgggatttagtttacctgaatctgtgatatcacatccacctgcctgtcccctcagcaccttatccaagaactcctttcacctatgcgtgctaatcctcttgagaattctggtaaattcaattttcttcattcccctgctttccagaaagttttgcctccaatggtgtgttccttgcagacctgtttcatgcagctccacagccaacaccccacttcacacggcatgctgaggatgcagcatcacctggccagggttacatctgcttggaggctgttcaggtgctgagaactctggcagtgtcagggaagcccacgacaacctcatagctgtgagccacagctcacacaaaaattgtagtaacatattcttcacatgttcctgccttttctcaaaggttcctcatggtttgggttatttattttctcaatgcttttatttttaaatagttatagatctgcaggaatttgcaaagacagtacagagagatcctgtgtatccttcaccaggtttccctgatgattacatcttacctacctacagcactatatcaaaattagaatatttataatggtgcaatgtatgcatatagttccatgccatacagaattgtcccatcaacataaagacctctcttatactatccctttctagtcatttcctccaatactctctccactatccctcaccccttggcaaacactaatatgttcatgtctataattttctcttttcaagaatgttacataaatgaaatcatatagcatatgacttgttaagattggcttttcccagcctggatactgccttcgagatctatccaaattgttacatgtatcaatacttccctccctttaattgttgggaagtattccatggtattaatcacagtttgctaaaccattcacctgttgagggacgttttgatggttttgagtttttggatattacaaataaaatttcaatgaaaattcatgtgtgggtttttgtgtggacataacttcatttctctaggataaatgcccaggcatgccattgctgggttgtatggtaagtgtatatttagtttgctaggaaactgccaaattttccagggtggctgcactattttagattcccatcagcaatgctagcatttggtggtgtcatcattttatattttagctgtttggatagatacatagtgatataaagtgatataatggttttaatttgcatttctctgattgctgatgatattgaacacctttttatgtgcttatttgccatctgcatagtctgtctggtgaagtgtcctttcacatcttttgcctatttttgaattggattgttttttactgttaaatttttagatttctttctatattcttaatataggttctttgtcagataacatggcttgcaaatatttttctcccaaactgcagcttgttttttttatcattttagcaggacttttcacagaacaaatattttaaattttaataaagtccaattcatagatttattattttattcactgtggttttacatcacgtctagaactcgttgcatagcccaggtcatgaaggtttttactctgtaatcctataaaagttttatagtttcacattttacctttaaatctatggtcgatttttagtaaatttctgtgaactgtgtgagttttggttaaggttaatttccttttacctatggatatccaattgccccagcagcatttgttgagaaaaccatccttcctccattgatttgaacttttatcaaaaagttttgaattttgccttgactgaacatgcagtccaaattcggatgcagtagaccatcagcatccagtgagaaaccacattgagactcagtgtcattgttggtgctcagtgtatcatggagaaaacctaacatcaagaacaagttgtgatcaaagttgaatacaacaggctatttactggcaggctgagcatgtaggagaggaatagagaattacagtttgtagactgaagaaagcattcttactaagatgctcccagttagatgcaagtatcttttgaggctgtcaaactgctggcttgggaacacttggtaggttcagaaaaacagctggtgctttgtggagccagtcctcacgatgcaaagtaaaaccagtgagcccttttctatgttaacaatactgcattaacctggtctggaaaagagaaacggtgatttgaaaattgctcttgccataatatctccccagagaagtactggaaacaggcaacaccattattttttgcacaatttatgaactgaagtgagatttatgagcaggatgcagtttatctgcttgagacatgggatgctggattttctgtgtgatgaggtgagcaccctaacatgaacttgtacatcacttcttcaaataagcctgaagatgacttcccttctggttgacttcctctcctctggatacatttcctgatctggacatgggacatagaatcaatgtgcaggggcagccttggccaaaatgaagcacccccagaccatctgctgagggatttgactgcctgtggacaaagtggttgccagccagcctctggagtctgttggcacagcccgctccatggaaaccatcagcagcctcttgctcagaccaagagggaatatctgttcaaaagaggctctcagcagtacttaaatctagcagaaaaattaaaaatgttcacgacctggcaggtggtccatttgagcaccaaagtgccatttagcttcccaggaaaaaaaaaaaatctaggtagtaagcggaagaatgtccagcagggaagaagataaattggaaggacactgaaggagaaagcaactcccagggacagctgctccatgtgacgcactgaggacccactcattgtcatggacacacggggtgctgtgctcacctgtcatgaataatttgtgaactcacacaggactcctgctccaccatgtctccagtggctctcatgtgttggccatatttattgagttcactccatgggtctgctgaacagactgtagaccgtaaggcaatgggatattagtgcaaagagaacagagacagcttttgaagaccaagttagacttgtgaaagttagacttgtgaaagggatcaaagggttgttttaaaagtatctttaaaaactagcatttttaaaccctgagaggggtggctaaagatctgtgtcaatttcacaaccaagtactcttatgactttaagccaataacttgacttctgtggatctcagattcatgtctttaaaggtaggaggatgtaggcttaactcatggagctgtctggagagatgcttagaggtatctggaaaataatcacatggaaatcagctgagggcccccatcttagtggatagcaggtactgcctcagcttcccattccatttatatgttcatttccttaaccctacatatattcccacacattttaaccatgtgtcacgggtgtatgaagctaggaaggcaacactggtgagtttgattcatcaggggtcagttgggcacccactggggagttggcactgggcttggtgggcactctgagggaaaaaatagaaaatgacaagatgcggtttctgcccctgaaacattttcaagctcgttatgaagataacacacttgcccaggcacagtgaaataactacacagtggggtgtaatgcttaataggataaaaagtcaagcaaatggagttatgaggatccaggactgttttcatgctagtctggctcacagaacgctagcaggttgtactgaccttcaggacaagcgtaagtaagacctacgatgctcgtttgatcccaacagttatctcccctttctcagttcctgtcttctcccagagggtggcaggtagctggggaagagatgactgggagtggagaggtgccgctgaccattatggtggcagctactcattcagggtgctctcctcctaattctgctggagaacactattttgggacaatttgtcatcttggctggagggtcctttcctaaagtctagcactgatagaacacaaggacgtaagtgctgccttttaaccaggaaggcgaaggcaaacttttctttaaaggagagagttgcaggtaatccctggtgtttttttttttcaatagttagcaactgcaggggaagggaaaggctgtaacacccttcagctcagacgcacaatgggaatattaatttgagcagtttccatttcagtcccttgtcatgttaattttgaagtctggtatacgcccctcaattctagttgatgataagctctaaaagatggcaagattggtgaggccaaaatgcagctgacaaactgagcttacttagagattttcaaactatttgtaagactggcatctccaataacacttttgtcattcctgccattcaaacaggaactgttccctggaagacccttaaataaacctgtgctttcaacccactcacctgccagaggtggagcctgaaagaactggggtgtgggcttatcatcccagttgggtctcctttatttcccactggtgttttctgaccatgccagggaaagcaaacagtggctacattccagcccctccacagtcaactaagtttcattcttccctctggctgagggtctgttggaggtgagcccaggatccctgaggctgctacagttgtgtccctctgtccctttgaggtctacccagcagatgtcttctacagggaaatgcaaatcaaaaccagagtgagatactacttcccacccactaggatggctagaatagaaaagacagatgggaacaattgttgaccaagatgtagataaattgggaccctcatagattcctggtgggaatgtagtgtggtgaagctgctttagaaaacagtctggaagttcctccaaaggttaaacataggtttattacctgacccctcaattccacctcttggtgtatacccaggagaaatgaaaacctattctcttctaaggtgctggaaaagctgttcaggagcgattacagctattacccatgtaggcagacagtgtgcattcacacatttaattcatttattcaacaaaatattgagtgtctactatgtgtcaggcactgagaagcagtagtgaacagaatggataaaaagctgtgccctcatttacctcactgcactgtggggaggaggaacagaccatcagcaacataagtaggtcatggaataggttagacaggttctggggttaggggagacacagctattttaaatatgatgatcagggaagtcctcactgaaaaagatgtaatttgaatgatgacccaaaggatgtgcaggagatagtcaggcaggcatctagaggaagaatgttctagacagagggccatcgagtgcagtgtctctgaggtgggactgtgtgtgtgcctggcatgcttcagggacagcaaagccagaggagctggatgtgagcaggtgggtgtggctgtctgagggttatgacttctgctctgaatgaaatgggttccggaggaatgacatgaagcttttcctgttacttaggctttaaaaggatcactcaggctactttgtggggaagagctgcttgcttactggtagtggggaagcatgaagacagaccagttaggagtctgttgcaagaatctagtgagaaataatgacatctgaaccacacgatagcagtggaagtagtgacttgaaggatttctaccaatgctcgtggaagacaggagatgggtgaagtgatgtgatgttatgtcgtagaaaatctgggtaaataaaatcaagatagatcaaggaataatgaaaagagagatggacttatgggcaggatgcttgatatttatatacagcagaggtaagtggctggtatcctagtcaaaacattgtagctgtcaatctaccctaaaattacagaactaacccagttgctgggctcattattaataatggcagaaagcaacataagcaaattgagaggataaaattgctttattggtttggcttccaaatcatggagagcaaaacatcacaacaattcagtgagcaaacacacagaggtgcttctaaaccatgaggcagaaaaccatttatgtttattttcataattggttttctggataggccaaaaatataacagcaccattcccttctatagcatgagggaaaatcaagatttcttttttttcctcttctatgttcatttccttcttcctccagtcactctttttgattgctatgattgtatccttggatggctcaattgcagtctgttgaaattaaagaaaaagattctacgaaaaactataaaatggacaggtctggaagaacctctttttctaaggctatgtgtcataaaacgtacgtatttactttataaaatacatttcttgattgaatttaaaatatgttttcgttgttagaactttgatttccttgcaggttttcagaagcacattacttcaaatcctacgagcccactgtaggtgatgagaatataagcagtgaacaaaacataaaaccctggctttacagactcatagcctagtgggggagagagaaatgcacagataaataagaacaatagatagtatgtttggtgatgagtactacagagaaaggaaaagcaaagatgggggtgaggagctccaggtagtggggtggttgtcaggtaaatgaggtgggcagggaaggctcctctgagaaccttttatctgagtaatgacttcgaggaagtgaaggagacatgcagacatctgggagaagagggaatagcagatgcacaggtctcaaggcaggaggattgtcaaagaggcccccatggttgggatggagtgagtgaactgggggtagtaggagatgaggtcaggtcagtgacggggagcagggcagattgaatagcaagccaagaaatcaaagttctcacaatttccctctctagtgagaaggaatgccagaagagaaacgagatatgtttaaaaggattgttaagagatagaatgggagccaggcacggtggctcacgcctgtaatcccagcactttgggaggctgaggtgaatggactgcctgaactcagaagtttgcgaccagcctaggcaacacggtgaaaccccatctctaccaaaatacaaaaaattagccgggcgtggcagtgtgtgcttgtagtcccggctactcaggaggctgaggcaggagaatcactcgaactcgggaggtggaggttgctgtgagccgagatcgtgccactgcactccagcctgggtgacagaatgagactccatctcaaaaaaaaagaagagacagaatgggcaaaaatgtgcaaatctttcatttgacaaggaacttacagatagaatatataaaggattcttacaagtcagtaataaaaagataaatagcccaattaaaacgggcaaaggatgtgaatagacaattcgccaaagaagatttacgagtggccaatatacattacatttcactaatggctagtggcattgagcataaaaagatgctcaacattattcattgttagggaaatacgaatcaaacccacaatgcgataccacttcacacccatcaggatggctagaatcacaaagacaggcagtaccaaatgttgacaaggatgtggggaaattggggctcttgtgcattgctggagagaatgtaaagtggtgcaactgattctgaaaaaagtctagaagtttttcaaaaggttaaacataaaattaccatatgatccagcaaccccacatctatgtctatgtccaagaaaaatgaaacattcccacacagaaacttgttcacaaatgttcatagcaggattttcatatagccaaaaaggcacaaccaaaaataaccattagctgatgaatggatacataaaatgtggtatatccatacaagggaatattaattggcaataaaaagtagtcaagaactgataaatactatgacatgtatgaatgaatcttgaggacattatgctaagtgaaagaagccagacccagcaggccatgtgctgtgtgatactgtttatgtgaaatgtccagacatttcaatgagacagacagcagattagtgaaggccagggccttgaggaagtagggaatgaaggggtgaggactaaggggaatgggtttctttttggagtattgaaggtattctaactgtggtggtggttgcataactttgtaaatgcactaaaaaaaactgacttgtacattttaaatgggtgagttataggatatgtgaattaattatattttcataaagctgtttaaaaagaccactctggctgctctataaagaatcttgtacaggacttacaagcagggggggcaggatcttactgaagaggctgctgcattaatgcaggatggtggcggtggaagtgagagaagtggtcagattctggctgttttaacagtggagccggaaggctttgccggtgggctggatgtggggtgtgaaggagatggctgccttattgttccattgggaagcctgcattgaggcagagaggagccagagatctggagtgaatccataaatgaacaaatttatggccctcctctatggagaaggcagtatgctccaggaggtaaaaggagacagactccagtccttgcctcaagaaagttacactctgtagatttcagcacagtaacacaaaaaagttaaacgagtatgacattgtgataagtgtttcagacaacaccagaagagatattgcaggaacataaactagtggttgccataggaattcgaatatatgactcttggctggaatagccccagagcggagggctgaatggaggacgataatggcacacagagatgagggagggagccacaggaaaactgcatttcaggagtcgggaagtagaccactttggctgaaatcaatttcatgtggagatgccaagggagataaggttgagaaaagcagaaaacaattcccttttaaaacacagagaatacttgttcatcacttgactgatcacaagaatgagctgagcaattttgttatagatcataaaccaattgcccgcttgcacaagatttaatacgaggaagacctactggctttctctgatgatgagatgataaacaatagacatgacagattgcctagaaaatgagacataataatgagagtcaaacgctgttattaaatccgtgtgaagggggaatcaggaggataagaaaccactgttaatgatggtgagaaagctgtgatccaaaatggcctgaggggatttttgttttcacatgtgtgaattcaataaattatgagactgtcaaataggtccattaaaaccattaagtatactcaagctacatatgaaactacgtgctcttctttcagaaaaagcaaacaagatggccttgtgattttttaatgaataatagacattcatttagatttttttttcctcttgtgatagatattccatgctcaggtactggcaatgatcattatagcccagatgttaggagctcatgtcttagaatgaggatgtctctgttcaaattccagcttcttgttttactgccatttaatctctccgtgcctcagtttcttcatttgtaaaatgaggatgatgttgacagcaatactcactttatggggttgctgggaggtaccatttgtacagcacttggagtagttagctcctgccgtttatcaacactccaaaaatgttagctgtgaactgaaagcctgcttttctacctattcatcactttctgcccacttttgttgtagctaagcagtgtgtttcttccttattacaaatgtccttgcacctcttgttgatggagcaccagtttttctagaatgaggggctgcttttcatttccagcagcacaatcagtggctggaaaagggagagagaaaccccagacaaaacccacctgatgcatcacagatgctgcagaccgaggcctggagaaaaaaagggggacttgattccctttgatattgggagaagtctgtttcccaagctgtggccactgaaatgaaactgctgagatccccatacctaagaaggaacttttggacacaggaaggggaacatcacacaccggggactgttgtggggtggggggagaggggagggatagcattaggagatatacctaatgctaaatgacgagttaatgggtgcagcacaccaacatggcacatgtatacatatgtaacaaacctgcacgttgtgcacacataccctaaaacttaaagtataataataataaaattaaaaaaaaaagaagaaggaacttttggacaataggcgttcttccattataggatgaaagggtaggtggggctggaagtatactcagcagtggacactcttttccccacaaggagcttttttacttttaaaaactaaaactgaaatgaattgttataaaatatcacatcatattaaaatataaaatattttatattgaaacatatattcaatatatcttggcactctgtatatgaaatattatatcatacctgatgatatcataaaatatcattttaaattatattaatacaagtttgttttataaaacctaaaaaataaccaagaaataaagcagggaaaaaaaccttgatgactgcttctcagaagcttgcttatacgatttccccttttgaaaattaagttttttttcagaatactctgttttcttagttatcaatgtgtgagtacaggtcaaatgacttataatgaaaattgttaatatggaaagttttgtatttccttaggctgagtttttttaataaataaacttaaaatttggaagagttctagatttacggaaaagttgcaaagagagtgttgagagctccccttggatctccctcacccaggttctgttcccttaatgtgaccgtcttatgtcaccacagggcactcgttgaatctgagaaaccaagcttgttgaaactaaactaaatgggcttcagatataggtttacctttggatcactgcaattatctccctcctcacccatctttcagattagtaattttttttttttttttagatgaagtcttgctctgtcgcccaggctggagtgcagtggcatgatctcggctcactgcaacctctgcctcccgggttcaagcgattctcctgcctcagcctcctgagtagctgggattacaggcgcctgccatcatgcccagctaatttttgtatttttagtagagacagggtttcaccatgttggctaggctcgtctcaaactcctgacctcaggtgatctgcttgcctcggcctcccaaagtgcagattagtagtttttttttttctttttttgagatggagtctcgctctgtcacccaggctggagtccagtggcgccatctcggctcactgcaagctccgcctcccgggttcatgcccttctcccgcctcagcctgccgagtggctggatttacaggcgcccgccaccacacccggctaattttttgtatttttagtagagacggggtttcaccgtgttagccaggatggtctggacagattagtagtttttaaaggtcttatatctctcattcttgaatacaatataattacctaatttaaatcacttgtttcaaatttctggaactcattttcgctgcgaaagaatactagccatgattatcaaatatgtgcttttatctgtggtagtttaagcagaataactaagcaacaatacaataggccctcctcctggggttactgtgtaatccacatattgaggtgcccaacaaaacagagtccttaaatgtcttacagttatggttctttctttattctacattttttaaaacgatgaagaaggaaggctgtatcagagtcctggtagaaaacatgacacactcaagtgaagcaaccgaggacacgttaagacatttattcacagagctacgggcaagtggaaggagactcttggggtagtgcagtactttggagctagcaagagtggggagctgttaggattcctaggcttgggaggagcaactgcaaaaaatgatggcaacatatatgcaaacagacatcaacagttaggtatgtattctcaaacagacttcaaaagtaatttaacacaattgttcgtgtgtccttcagtctagacactgttattcacatcagctgtgcaggactgaacaaagagagaaatcagaacttctggcaaaataaagggataacatgtctcgttcaacttgagagtcacaattcccctgctgtttctggtaaatgctatgcctcatggaagctggtcagagctttgtcaggctttctagaattagtatagtcagcatctttgctgcagaataagctgtccctgcttcattatgcaagctgcactgtgaatgtttgctgtgacgctgccgtcctcagtgcctgatgctggttttgcatttgagtttcattctttttctgtattcatgcggttgggagttgtttcctgcataacagcaccattaacagctacacctcattttctatcaattccttaagatttggatggaagaaattcctaaatcacattccttgtcagacagtttgcatgtcagtttaaggtcattaaatccaccatgatttctgaaatttctcttttgctcttcagtttgtgaacatggatttgtaagtcaccattccaaccaggatgcatacactgaaatgcatatccagattaataacaggctaggaagaataatgagttctctctctcttcattcattcacacatttgtgtttagacaaagacattttggaccaaatcatctataactgactgaaactccgttttgattgtcttaataagaaatgaatttgtagaacattttaagggctttattaataggttataagtttacgataaaagcaaaataacttaaaattttttaaaaggttgaaaaagaatgtattactaggcttataggttagataaatatgaaaatatgaaaaatttgaagagatcatattcaaaataaattaagaaaccaatttttatgttaaatgattaataaatgagttggtgtctgtatgggggagttttcttttggtgtgcaatagcgcttgtcttcaatattatcaacaaatactctggaaacaggtatcagtgacacccaaaatattaccagcagcaatagtaaacataagtgacagtgagtaagtgctaaccatgccccagctgtgtgcagaggactctgtaggatgatctcacttaatacccacagaacataggtcttgtaatgaacctattattatccaagggaatggaggcaaagaacggaagtatacccaagatggcaaagggttggagcaaaaatctggacccagtttttctgattccattgcccaggctcctaaccacaagactctgctcttgcccagtgattcaaattcgtgcttgctttgcagctgggatcgaggcaggggatgtctgtgagaatctgggccaccctgaatgagaacaggaatccttcaaaatgaaacttatcatgattcactacttcatgaagctgccctggcatcctaaaactctcctcgcaaatatagagaagtgagaagtttttcagcaatgacatctacaaaaaagactagagggtctaatgattaacatttttgaaatgagttcattgtatgatttggctgctataagtgctagacagcatatgggaatgtgttttataagccataagtcactacaaaatgtcacatgtacgtatatgctgtaatgataggtgttgattctgctataaagctagggaccacatgtgggaaagtgttctgtaaatcataaattactatacaatgtcaaatatgtatatgcatgtgccattgatagatattgactctcagaagaaggaaatgaagcatgtcttcttgggaagggaggttggagggattgattgtctcctctatgagtcatcatccctatttgtttctgaaagatttggcgtggtctgtctggacatgaagcatggggacagaaaagcaataagaagggagggagaatctctctcaacaggtcttgctgaaggctggcatcacaccccaggggcctaggcagtgtgtaaagctgatttatttctctggtaagttgcttttattcatagattgttctcttgctgagtaatccctcagtggaggtgatgtctgttaccacagctcatcactgactctttctgcagacctcaggagccctcaatccctgtggcttctcttgccaagggcaatttgtcctaatgtcccaatcaaacagtgttatggttccccgcagggcagatggacccccacccaaagtttgttttgaatgcgcagacagaggtgcacataatccaatccatacacaatccaagagggcacgaaaagcattgcaacttacataattgtggtctctggggagggcagagtgggcctctcaaacaggctaaaatggcttagagaataggaaaggacactgacctggtggttaagggatagagcaggctgaaagagccctctagtgagccagtgggcacatgcttgcatggtttgaacctccgggcagtgccaacagagggaggccccaggctttctttgcagcttgtccaggtgtggggcacaaggaagaagaaggggaagccccaaagctaaagccaagcagactcctcatctaccagcaggctctacaccatgcatgccaggcaagtggtgggattcttgcaggtgaccttttcctgggcggcaggcccatcccgacacagccaccttgcctcagaatcctctggaagaagccagccagctggtctttagaaccttggaagtcttaggaaaaatcagacctatgtgttgccccttgtcccttgccctttttctcttggtaaagaaattctcttcaaagcccttcctgtcttcacacacacccacccttgaacacctgtggtgacgaggaactcatggggattgtatctgcttttcattttgggactacatctgttgagatttgcttcttggtctggcattttagtttggaactgcataactattgtaccttggaggaacattttaatatcctgctacagttgtttacttattacttattactggcttcttgcttattacataatttatccttcaattacttctcaaagggattagagaagattgacaacatggaaattcatatgctgtcatccagtttcaagtacagtcagcattctcctcccagtgggaaatggctttgatgttcctcatggtttctcaaagacaccaatggatgtactcaagagggtgataactatgtctatggtaaatatatttcttaaagctttatttaaaatgaattatttttaatcaggtaacttaggtatattccagtatcatcaatagagctttttctctgtgtgtggttttccttttgttttgttttgtttcttttttaagagataggatctcgctctattacccaggctggagtgcagtggtgcaatcctagctcactgcagcctcaaactccttggctcaagcaatcctctcaactcagcctctcaaaagtagctgggactagaggtgcaagccgctgcacttggtaaacagagcattttttttttttaagaaaaaaattgatgtgcctggatccaccctcaggtattctattttagtaggtatggaatatatctagtatatctaggtattttcattgaccatcaaaagctgcacaggtgattctgatgcatgccctggttcaaacctatccctccccaaaccataacttatctaattagtctatctctgcagatccaatcttctttaccttttttgtttttaaatctagaattctacaaataaatgaaacatttctcagcgtgtcttacccatgctggacaatatgtctcagttatttcactatttgtctcagggaaaggttttctgatgatggcaaatagaatagggaatctcacagtatgagtaggatagaagtattgagccgcaagggagtgccctattttgtatatgtctgtccttatcttccaattctaatgaaaaatgccctgcccctctgatatggtttggctctgtgtcctcacccaaatctcatcttgtagctcccataattctcacgtgttgtgagagggagccggtgggagatgattgaatcatgggggaattctttcccatgcttttctcatgatagtgaatgggtctcacaaggcacgattgttttaaaaacaggagtttctctgcacaagctctttttgcctgctgccatctacttaagatgtaacttgctcctccttgccttctgccgtggttgttaggcctccccagccatttggatctgtaagtccaataaacctctttcttttgtaaattgcccagtctaaggtatgtctttatcagcagcatgagaacagactaatacagtaaattactaccagtagagtggggcattgctgaaaagatacccaaaaatgtggaaacgactttggaattgggtaacaggcagaggttagaacagattggagggctaagaagaagacaggaaattgtggaaatgtttggaacttcctagaggcttgttgaatggctttgaccaaaatgctgataataatatgaacaatgaaatccaggctgaggtggtctcagatggagatgaggaacttgttgggaactggagcaaaggtgattgttatgttttagcaaagagactggtggcatttttcccctaccctagagatttgtggaactttgaacttgagagagatgatttagggcatctggtggaagaaatttctaagcagcagagcattcaagatgtgacttgggtgctgttaaaggcattcagttttataaaggaagcagagcataaaagttcagaaaatttgcagtctgacaatgcaatagaaaaaaaaaattcattttctgaggagaaatccaaatcagctgcagaaatttgtgtaatgagcagccaaatgttaatccccaagaccatgcggaaaatgtctctaggccatgtcagagatcttcatggcagcccctctcatcacaggcctggaggcctagaaggaaaaagtgattttgtgggctgggcccagggtccccatgctgtgtgcagcctagggatttggtgccctgcatcccagccgctccagctgtggctgaaaggggccaatgtagagctcaggctgtggcttccgtggatgcaagccccaagccttggcagtgtggtgttgagcctgcaggtgcacagaagtcaagaactgaggtttggacacctctgcctagatttcacaggatgtatggaaatgcctggatgtccaggcagaattttgctgcaggggcaggaccctcatggaaaacctctactagggcagtgcagaagggaaatgtggggttgaagcccccacacagagtccctactggggcaccaccttgtgcagctgtgagaagagggccaccatcttccagaccccagaatggtagatccactgacaggttgcactgtgcacctggaaaaactacagacattcaacaccagcatgaaagcagctgggagggaggctgtaccctgcagagccacaggggcagagctgtccaagaccatgggaacccaccttttgcatcagcatgacccagatgtgagacgtggagtcaaaggagatcattttggagctttaagatttgactgccctgctggatttcagatttgcatggggcctgtagcccctttgtttttgccaatttctcccatttggaatggctgtatttacccaatggctgtacccccattgcatctaggaagtgactaagttgcttttgattttacaggctcataggtggaagggacttgccttgtctcagatgagactttggactgtggacttttgagttaatgctgaaatgaattaagactttgggggactgttgggaaggcataattggttttgaaatgtgaagatatgagatttgggaggggccaggggtggaatgatatgatttggctctgtgtccccacccaaatctcatcttgtagcttccataattaccacatgttgtgagaggaacccagtgagagatgattgaatcatgggggtgggtctttcctgtgctgttctcatgctagtgaatggatttcatgagatctgatggttttaaaagtgggagtttctctgcataagctctctttttgcctgctgccatcttgccttccatcatgattgtgaggcctccccagccatgtggaactgtaagtctaataaacctctttcttttgtaaattgcccagtcttgggtatgtatttgtcagcatgtaaaaacagactaatacaccttccctccaatggctttatttccatattttgctggaccaattttcaccttcatttttaactccctcatttgttttgtcttgcaagcttaactaaggtttgaggtgggcagacatttctgaagacagtgatctctttttaatgacatgccacagttggaagctaccttgttaggaagtacaaaactgggaggcatttgtcttacactttcatctggtaaagtgattcaaagaccaattcaaacttcgttgaaattatagtaacattttagaaaatgacacacacaaacccaaatggcacatgcaaatgcaaaccttagcatgcagaatccttggaattgccaaatgttcaccaaatgaggtgtacatttctgtgagtataatggatagcattaaagattaagaatgctggaaactctgtgttggattaatgtccagaaacttctgattagttttaaacacagtaacttagaacacaacagctttcccctttttatttttgttatgccagaaattgtgtggtaaagttttcactgtagaaaaaaattagaaaacattaaaatatcacaagcctgcctcaatgtcaccacccactaataagcaatataaataatttggtttatatttccataaaattagttaaaagggtatcatgttatatactatttttagctgtttagctcagtgatgaaaataccatagaacttttcttttaaaatagataatagttcagggtttattaattgagcatcttctgtatatcaggcatttgaggtattgggatagagtggggagctcacagaactttcagttgagtggaggagttagtcattaatgaagacacatgcagggtgtgaggagaggctgaaatggggctggggttggtttaatttgaaggtcaagaaggaactacaggaagaagggacatttgagctgatatctgaggaatgagagagagatagcagggaaacagctggtctgtccagacatgataatctcatatttattccatgttttaggtgcagcttcaaacttaccatcttagcattgtaagaagcctccccttctgcctctcctgcccctctaccttaccttgtggctcttttcttgggtcaggagcctggaggtctgggagtccagctctgagcctgctccctgctcatacctgctgtttctctcttctgttacacatccttctctctctgactcagctaggtccaatactaggtcttttctcaataggagaatcgtgtattaggagagaaattttctattcttatcaccaattacaagatgccaagaaaagcttattcaataaaatatgtggtgcaattgtgagattcccttcattgcaggtgagaatattcttccaacagagttgaggtcaaattctcccagcagttaccgggtgactctgtcattgtgagcacaatgtaagtaagcaagaagttgggttttccaggccctacagtatgcatctgaatagcactcatcacacggtttgggggaaccagtctcttcctctttactagaggtgtaactagggcaggttattgaaactctgctaacctcagttttctcactgataaatgtcctaataagctcagactactataacagaataccacatactttgtggcttaaacaagagaaatttattttctcacagttctggaggctggatgtccaaaataatgggtgctggctgattcagcttgtggtgagggctctcctcctagcttgcagaccgccaccttcccattgtatcctcacatatggtgaagagggagggagctctggtctctgttcctcttcttacagggatgttaatcccattatagagacccccactctcatgacctcatctaactttatcagcctcccaaaggcctcaccacgcaaataccatcacattgggggtaagtgcttcaacatatgaatttggggggaacacaaatattgagtccataacaatacagtagggatgatgacactgttgttggcttctgttgtttttgtctgctcagcatccctttccttgagaagcagccatgcaccatctggtgctggggagaggcactgccaatgccacaagtcccacctctctggtcatggagggggccatgaaattcaggcccagccagtgatagtgacctatccttttagcctcagagtcaggctcaaggttgtgaatgtgactcaaataaggtcaatcaatccttctctggggtcttatttacagatgatgagcgagaccctgactctttcctaggcccatgagctaaaaaaaactatgggcagccatggtctccattgcacaggagagatcttgtctgtaacaggaaagaataaaccaaaaagagctgagaataaggggatcagggagagaggaaggggcccgtaacagtggaggagacacccacccttgtcatccctgaggttaacttcacccttagacttccctgtgatgcttctttagcattccttttcattggcattagttttggttgtgttttcatcgattggaacttaaaaagttctggctaaataaaatattgactttatagagttgtgaaaattaaattttgtattatgttaagggcttcattatcagagcctctggaaaatggaaagtacttaataacttatggctaattgtattggtggcccttctctctgtttttctggaacctggttagtaaacggtggtccctgtggtccagtggcattggcatctcccaggagccaattagaaatgctgaatctcagacctcacctaaaatctgctcaatcagaatacgcatttggcaatgtccatgcatgaattgtatgcacataaagtataaaaagtactggcctaacaccaaaagcacaggcaagaaaaataaaaatagacaaattagactccatcaaaatttaaaacttctgtgcatcaaagtgcatagagtgaaaggaaaatcatgtatctgacaaggcgttaaaatccagaatatataaggaatgtctacaactcaacagcagcaaaacccaagtaacccaattaaaaatgggcaaaggacttgaatttctccaaagatgatataaaaatggcaataaacacaggaaaaaatgctccacatcactaatcactaggggaatgcaaatcaaaaccacaatgagatattgcctataaccattaggatggctatgaacacacacacacacacacacacacacacacacactagcaagtgttggtatagatatggagaaattgaaatgcttgtgcagtgttggtggaaatgttaaatggtgcagctgctatggaaaatgtatgaggtttcccctaaaaattaaaaataaaattaccatataatctagcaattccacttctggatatataatgaatataattgaaaacaggatgtcagtgagatatgtgcttgcccatgttcatagcagcaatattccaagtagccaagaggtgaaagcaatgccagtgtccactgatggatgcatggataaacaagatgtggtatatccatacaatgaaatattgtttagccttaaaaaggaggaaaattctaatacatcctacaacattaataaaccttgaggacattatactaagttaaataagccagtcataaacagacaaatactatataagttcacttatgtggggtatctaaggtagtcgaattcataaaaccagaaagtagaatggggctgtgggggtggtgatgggggaatggggagttgttcaatgggcaaagagttttagtcttgcaagatgagaagttctggggatttgtctcacaacaatgtgaatatacttaacatgactgaattgtgcacttggaaatggttaacactgtaaattatgttatgtacgttttactaaataaaaaagaaataagacgggctgggcgcgatggctcacgcctgtaatcccagcactttgggaggctgatgtgggtggatcatgaggtcaggagatcaagaccatcctggctaacatagtgaaaccctgtctctactaaaagtacaaaaaattagttgggcgtggtggcatgcacttatagtcccagctactcaggaggctgaagcaggagaatcacttgaacccaggaggcggaggttgcagtgagccaagattgtgccactgcactccagcctgggtgacagagcgagactccgtctcaacaaaaaaaaaaaaaaagaaaggaagaaagaaagaaataagacaaatgtaaacaaaacaagaaaaacactgacctgctacactggggttctttgatagaaaagtctgaaaatatgagatgttacaagtggatggcttcctaattccaagtagaaacactcagatgtgtaccgtggaagtcagaaagtcaatgagataaacagacttcacaaacaagtttaaaaagagttggtggcgtgaatgtcactggcgaagattttacaactagcagtcttcgtctgtcgcctggctttcacagaacttaaaaaaagcctcataatttaagtttgacttgtctcttcgatcactgttaccgtgttctttatagtaaatgtagtcaggattcttttgtaccctaactagggcaagtttgtttttggaataaatgcagccctcaaaatacagaagaactctgttccagaaaaatttatttctaggtcagttgaatacaagtttgaactcatttgtagttgaaaacaacgctagaaatagtctttaagttattagatgtgtacacaaatcttacaacataaaagtgcttaagatgaatttcactcacagccagtgaccacttctaacagcagaactttttgcagttcggagaaggagacctgagacacatttacccttcctcaaccacccagaggggattgtttgttaggaggctgccaaggtatagcccagggggttggagatgacctgatgtcatgctgcctccagcacagttggattttggtccttggcttttccctagtgtcattaaacacatcccctaagaaaaatgctcactctttggcctttggtcatcactgatgagttctagatctctctatcagaagtctacaggcatcataattagctagaaagggttctaagcctaagactcctccctctttctaggattctgttcaatgcagtgtagccatgaagattctctctttcaaaagagacctcactattctgtcaatggctgggcaagtgcccaaagcctacccaaatggaaggcttctgagaagcctgggtggagaacacagatttgcccagtgctcagagcttctgtgggaggctgaataatgcctccccgaagatagccatgtcctaatccctgaaatctgtgaatgttaccttgtggcataaaaaaaggatctttacagatgtaattaagaatcttgagatgggcagagtctcctggatgaccaagtgagtcctagtcctaagtacaatcacatgtactctttgtaacagggaggcagagggagatttggtaacactcagaggagaaggtgacttgaagggagagcaaagagaggttggaagactctggccttgaagacaagagattagaagatagcatccccacaagtcaagggatgatggcagccaccaaagggtttcctgttgacacctcgattatagtccagtgattctaatttctggcctccagaactgtgggagaatgaactgcgattgcctgaaggcagcaagtttgtggtcatttgttatagcagccacaggacatgaatacagcccccatctgccacctgcatccatccttggcactctggtgcatgtgctccgagccaagtattacccacgtggctggctgcaaggagacagaaagcaaggacaggctgtgatacctgagcaggaagaaggacaacagggaaacagaagacctattgcactgatgagaaggagaagggagagacctgcctttacagcacaatgtattaaaatatgacaccatgaattccaggtttccacaccgtctcccttcagggagaaggagcagaatagtaacaaggaattgaaatcttgtgtaccagacgatcccatcactgcctttaccacctcccatggacacattatggacaaagggagcttggggcacaaatagtcctcctttctcaagctttatcttgtcctaaattgatctcattatctcccttgttctgtctctacccctctcaacttatgctgccttccgtgcccccactttagtttatagcatcatcatcatctgccctatatgtacccaagagaagtgggaccaccctgactccccttttttccatcctgccccatatctcattagaaatgtaagccctttgtattatccactgaacatatttcattgataatttttcctttttcattctcattgtcagtccctaattgaagtcctctttcacaggagcttcaccatatcccagtccgatcccactacttccctgatggaaacccttcagtgggctcctggcatgtttcccagaaggtcccagatctctggcatcactctctgtggtttgaacttgctttctttcaagattcacctgtaattttattctgcttttcactataaactgtagactatagttacacttaagatgttaccatttcctgaccatgccacgcgatttcatgacaccaagtctattctccttggcataatgtaccatggcttccccagcagaactgggggcaatgaaggaatgaagccctacatcagtgctttcctttaagactgcagggaagaaacatggagaacaggcatccaaaagggcaggtcaccccggtggccatacgttgccctcagtaacttcagccccagagtccccagcaagtctcaaaatcaacacatttggccgggcgcggtggctcacgcctgtaatcccagcactttgggaggccgaggtgggcggatcacgaggtcaggagatcgagaccatcctggctaacacggtgaaaccccgtctctactaaaaatacaaaaaattagccaggcgaggtggcgggagcctgtagtcccagctactcgggaggctgaggcaggagaatggcgtgaacccaggaggcggagcttgcagtgagccgagattgcgccactgcactccagcctgggcgacagcgagactccgtctcaaaaaaaaaaaaaaaaaaaaaaaaaaaaaaaaaatcaacacatttgctccaagaggctccaggtgatggcttaaacatctgattcaccttatctttttcttccagaatgtatacattcatcccttgtttaaagaagtttggtttactttttttctttaatctacctgagtttagaagatgccagtctttgcatttagtaattgttttgcagcaagttaaagaaagcaacacttccactccaagtctataccaccacctccttgtgctcctcttccctgagtgtgagtttctgcagagaaggccctcaaatcccccaccccagcaccaatgcttagtgcttccttccctgctggagtgtgtgcaggtgggtaaggactttgcttgatggtatagtagatatcttagaacacagttcattcctctgtcaaaatgagtctgctgatatacagctgttgattaaatacccaagctttgaattgcctaagcattttcccagaggttttagcctggaagtcactaagttgcctgtgagagtcaagattacattttcccccgataccagaagaaacgaaagctcatgagttgttgagtgcagctatggagaaatagaatgtcacctctctgtacaggtaaacttctttaacctcctaacatcccattgggcagaagtcatgtctgtcccctgagaagggatcagcttctctcccacatggatcacactttaggtcaactttcggacccaggtctacactcttacttcttggaaagcaggttgttttatccaaagtgttcttcatgcgccgtagcgacttctgcaagaaaagtctatgtacgtggtaggggctacagtccatcccacgcatgccccatggaagaaaacccttctgcatcctgcttttctgctgctgggtgattggaattcatcactggctgtctccagttcagaggtggcccacaattgtagcagtccccgttaatggataatataggatgttttgcatactttggccaaatatggttgtcattttaatgtatgaaccgacacagtctaagatttaggtctttcctgaacttcattctggccctatcattttatgcacattctgtaaatgcgggggaggagacaatgataaggaaaaagcatggaacttcacaactacaagctctgaaagggtctgctctacagaggatcatcagacattcctggtacatatcctatttggatcacactgtgcaaccagtcctaggtcaggtggcagaaagggttgcctgccctctttatgaggagaggaatctacttcttaacctgcttgctgaactcttcagtgacctcacctctgacagcaaagtcatggagatctttctggccaggtttgtaaaagttaggtagctagcacggcagctctgagaaaacatgagagtgtgtcctgcatccactttttgggctctgtagcaaatttgggtgctgcctaagggaatgaaacaacctccctatgtataacctgatctctctaattgtaccttaatttgcttatgcagaaaatcactggaattagagccacacatcctgctcattctgactagtacttcatccagccaagtccagtaactatgggaagggaaagcagctgagggtcactctctttcggaaaggttttcatctgcttgcaaacccacccacacctctgccttcactcctgtaatcaaagatgcagatctttcttagggcaattaggtctattcatctcctatttctattttcagtgtgcctctccccgcaacacccaaacactcaggtcagttcttccacccatgaaagcataatgaatacttacctacctgctctgggcacctctggaatttcagcaagcaagtatttgataagcaaagactagtttcctgttaattatactcagaaatatgactcatacaaaagaagcacaaaactaattggaaaaagaaataaaattaggcctgagaaagtaagaaagtgaaatcatgcaatggtaatgggagaaaaaaatatccatgatgataagactgaattaatagcttagatgagtgtgtgtcgggggagcagggagggatgatacacccaggaagtgatcatagagggtggagatttgcactgacatatgagtcatgaccaaatggaacaataagttttgttttatgagataaaatgtccagccaatttagtccaccatttaattggttttactgatttttttttcatggagttgactcatggttgtcttcttcgttttccctattaaattcctcctccctattaaattgtctggtttgcattaagatgataactgccccactcttaaagatgattggaaaactggtacagaggagagaaatccgtcctggaaataagacagaattttctaaagtaggatgatggagggcctttctgtaccataaacaaagaagggaaggaggccccgcacggtggctcacgcctgtaatcccagcactttgggaggctgagggaggtggatcacctgaggtcaggagttcaagaccagcttcgccaatacagcaaaaccccgtctctactaaaagtacagaaattagctgggtgtggtgggtgcctgtaatcccagctactcaggaggctgaggcaggagaatcacttgaacccaggaggcggaggttgcagtgagccaagatcatgtcactgcactccagcctggatgacaagagcgagactccatctagaagaagaagaagaggaagaagaaggagaaggaggaggaggaggtggtggtggaggaggaggaggaggaggaaaggtaacagagatgttgagggcatttataaactgatgagtttgggtgctccttggattgaaagattcctaaatcagctaatccctttctcctcagaattatgtctttctgtatagcagtctgtcctccaagttgggaaactgggagttaggctacctgtgtagtcttctgattttactaagaaacagaaaataatggaacagggaacacacagagaggaaggaaccaggaaaccagttttccccatcctgatagtcactcttctgtttcccacagctgcttccttcagcagtaacgtctcaccattgagtggccagggtgtcctcagagccatcttgggtcccttggtggcctgagtgggtaggtcatagtgggtgtctacctaagcccagtagggccaatatttattgaatgactgttatgtttcaggcacattgcctacagtccactaatccttagagatgagaaaacagaagatgacaagttaagtaattttccctaagtttggtaaataaggaaaccgggatttgaggctatctgatgctcaatcctgcattatttctgctaacccaagctgtctgtttcatcaggtaacaatttttttttcaggaactcgtttagattttatggttgtattaggaaatcaagcctagaataatgcatagagtcatgctatgctgagatgtttattagcttctattttcagagagagctagatttgctttttcctggatcaactttctaagttctaaagcaaatgccccaaagaatatttcaggtagagcttagttctccatcttgaaaattcataccacaacccttcttgagtgcctgctaagagcagtttccatgtgaagtgcttggagatgattaaaacacatcactgcctatggggctctcaaggtgaagtgaagggaactcctagagacccagagaactgtacataatgagaaagtgcagtggtgcagctgagcacgggagcctagaaagagcataataccttcaactgctattgattgagtgttactctgcttctctgtctctgcttctctgtctctgtctagcatgcctaagtttgctatttccaagatctggattttggggtataatgcctatctgctgtttttttttttctgtccccctctccccactcttttttggcactacactgtttttcttctgaaaaactgtccttctgccatacctggttcatgtgactctgaagtgtggcttgatccacttcttggcaaggactcacatgagaggcctggcccattggtgtattccacatccctgtccagtggctggtttgggaataggcatgtgacccaagtcagaccagagcagagtaatctgaggacattcagggacctatggagaaagagataccctctttatggctgctgagcaggtaggaggcacagctggatatacagagctcccatagaggacagggtgcctgggaaagaagctgatgtagaagacaaaatgtgggcggggtcctggcgacaactttgtgtcctgggccaggccatatttaactagatgcatggacttgtagatctgtaatcccacaaatctccaacacgtcctttaccctatctcaccaggaagagtttgagtaacccttaatataataatccaactttcatctgctattgttcttgggtgaatagctattcacttctctgggaagttcatgggggaggagtgactagtagggtaggatccaggccttctggtgtccatggttgtaacgtcaatcacaatactgtcaaatgtcatctgaaactcctaacagaggtcaccaacttcatctccccacttacattcagatataagatttctaaaaatcttttttttttttttgagacggagtcttgctctgtcacccaggctggagtgcagtggcacgatctcggctcactgcaagctccgcctcccaggttcacgccattctcctgcctcagcctcccgagtagctgggactacaggcgcccaccaccacgcccggctaattttttctatttttagtagagatggggtttcaccatgttagcgaggatggtctcgatctcctgacctcgtgatccgcccgcctcggcctcccaaagtgctgggattacaggtgtgagccaccgcgcccggccttctaaaaaccttggtttcaccatcaatggttatttgcaggtcacgtcactggtcactggtggccttctcacagcataaaactgttaatgaactgagactgtagacttgaaaaaagtgtgaaatggaaaaacaccaaaacacctgtcttctgtgatgtttgtatacaaccaattatttgcaataatcacaaccggcttgaatacaatataaaaagaacctttccattatactgttaaaagtatacaaatgcctcactcaagtctttcaattaatataaagtatgattgagaaattaagcttgttaactttccacccccattcacctaacgcaacatattcaatatcatatataagaaacctaaaaccacacctaaacatgtaaaactcacctaaacattcatgttctggtgctattggctgtacaagtatgaggagatagcttttaaataaaaatggcaacatatattaagtatatttcatgaggtaagaaattgcatgattacctaagtccttttgatgtaaattgtaccacattttgcctgctctgccggtttaaacaaatccacagccctggaaattactctagatttgatttttgcgcttctatgcaaactataccacaacccatcttgcaaactataccacaatccttcttgagtacctgctctagatttgaactagagcaggttgcttgggtccctaggcctaggtgttcccttcacttcatcttaagcgtctcataggcagtgatgtgttttaataatctccaagcacttcacatagaaactgctcttagcaggtactcaagaagggttttggtatagtttgcacagaagtgcaaaaatcaaatctagagttaactactctagcaccaaatccagagtagttaacactcttgaatacctgctctaaatttaaacctgagcatgtttaaagaaggtgtcaatctgaagaggtaggaccagtcatcactgtaagtaatgaaaagggaagtcagtggaggaacatatatttcttcaaatacaagaacattcccttatgcaagctttcccttccccaaactctatgcaatattatttgtccagtggcaggaatcatgcttaagccattagcatcataaattgcttagaaaacaaagtatggcttatttgaaagatatatggagaactgagcaaattaagtctgtccctgctgttttatctttatttattaatggcaataattctgtcctaatcgtttgtatagcacttagtcaattatgtggcatctaaagctcttcaagtgattttagttaatgtcttcctttttctcctgcacaggcagatgcaaattgctctggggaaagttgtaaggtcaagggcagttgtggtttctgctgttaagggaatctgtacagtcacccctcttcccaagacaagaacttagaattgatgaagtaagcaatcaacagatcacagcagatataaggaaagtactttaaagagacggaatggtttgcaggtgtaggggatgataatggtagttttattggaagtatgagcatgtttaaagaatgcatcaatctgaagaggtggggccagtcatcactgtaagtaaagaaaagggaagtcactggaggaacttggctctgtccatctgagctctgtggccaggggagcagccacgtgggattccaattgattagtacagaacaggaccctggcttttgaggagaggattcacggggataagagccagtgaacctgctgataagatcacttctaccaagcacttcattcctgcaaccaccttcctttctcatttccagttccatagtcagcttgcaactttctgattagaaggtggctttttgggtggatcttttaactaaaggaagaaatgctttggaataggcattttgagttttagtgtttttgtgatatgttttaaaaatattttgtattgtggtaaaataacttgtaattattttaaccatttcttgagtattcaattctgtaacattaagtacattcacaatgttttgctatccttatcactattactagaactttttcattatcctaaacagaaatcctgtacacattaaacaataaaaccccatttccctctcctctcagcccttggtaaccactattctactctctgtttctgtgtctctgtttgttccagatatgtcatctaagttgaatcatacaatatttgtctctgtgactttggctgcactcatttaggacaatgttttcaaggttcacctgtgtcgtagcatgtatcagaatttcctttcttgttaagcctgaataatattccagtgtgtgcacataccacatttcattcatctattaatctgttcatagacattatgggttttttccaccttttggctattgtgaacaattctgctatgagctttggcgtgcatggatctagttgagttcccattttgaatttgtttgggtagatactcagaagtggaattgctgggtcctatggcaagtctctgtttaactttttgaggaatctccaaactgtcttccacattggctgcaccattgcataatcccagcggcaatgcacgaaggtgccagttgctccacatccttgccagcatttgttattttccatgtttttatattaaccattctaatggctgtgaagtggttatcattgtggttttgatttgcatttccttaatgattagtggtactaagcatcttttcatgtgctttttggccatttgtagatctcctttggagaaatgtctactcaagtcctttgcccatttttaaaattaggccttgtgatgtaatttctttatgtgaatttgtgtaacttcttcattaatcaatggaattcttagtcaacttggctgtaggaagggactgtgctgattttgttgatgcaaagagcttggcttactgctttgcagttacttctattataaattaaattgtccctgtagtttatttcagttttccaagccagattatcttgatttatgcctaataggtggattttctcttgctgtactggcaagtctgattctgaacttgtgaggcggtgggtctgaacccagatcatagcatgctctccactttaatgagataccttctgaggttcctggggcgggaactactggctctggatattttctaattaatctgcaagtttcatcgtccagtgcagtggccagtagccacacgtcatcacttaaaattaaattcaggttaattaaaaattaaataggctgtgcactgtggctcacatctgtggttccagcactttgagaggctgaggcagggggatcacctgaggccaggagtttgagaccagcctggccaacatggagaagccctgtctctactaaaaatattaaaaaaaaaaaaaagaaaaaaaaatagctgggtttgatggtgcacgtctgtagtcccagctactcaggaggctgaggcaagagaaaattgctggaacccaggagatggaggaaccaagatcaaaccactgcattccagcctgggtgacagattaagattccatctcaaaaaaaaaaaaaaaaaaaaaaaaggccgggcgcagcggctcacgcctgtaatcccagcactttgggaggccgaggcgggtagagcacgaggtcaggagatcgagatcatcctggctaacacagtgaaaccccatctctactaaaaatacaaaaaattagccaggcgtggtggtgggcgcctgtagtcccagttactcaggaggctgaggcatgataattgcttgaacctggaagacagaggttgcagtgagccgaggttgtgccactgcactccagcctgggtacagagtaagactccgtctcaaaaataaataaataaataaattaattaaattgaagaaataacccagttttttagtttcactagctacatctcgagcagtcagcagccacatgtgaccagcgtctgctatactgaacaacacagacatggaactctcccataatttcagaaagttctattggacatgttaattttttaaaataagcattttttggaatcataaacaatatttacatctaatagaaaacagatgttccccttcctgtgtccaagtgttctcattgttcaattcccacctatgagtgaggggcctgtcatggggtggggggagcggggagggatagcattaggagatatacctgatgtaaatgacgagttaatgggtgcagcacaccaacatggcacatgtatacatatgtaacaaacctgcacgttgtgcacatgtaccctagaacttaaagtataataaaaatatatatataaataaataaaaataagtaaataaataaataaaaaagaaaaaaacaggaaacagagaacaaataatagatggggaagacggaaaagaaatagcaagatgatagatttagatctaaccatatcgataatcacattaaatgatctaaacaccaaaattaatacacagatgttggcagagtgaatagagatgctacctataagaaacccactttggaggataattgacatctaaataacatttcatttttcagccaataaacgcagtgtatctctccgtttctttaggtttttaaattttatcttagcaatattttgtaattttgtcagatttgttcctaagtatttcacatttcggaagtcattttaaatagtattgtatttaaaattttaatctccaattctttattgctagtatatagaaatacaattggttatttatactgatcttgtatctgcaacattgccaagctcatttaatggttctgatagctgtattatagactccataggattttctacatagatgatttgcaaataaaattgtttactttttcctttcaaaaaattaaataaaataaaaaataagcattcttaaaggagctttggaaacaggtaaataaaactgaacaaaacagtaacaacctaaaaaatgactccgtgattaggcaatggattaaagaacaaaattaggacagaattgaaataaactctacagtctgactactagaaaagtgtccattagtattctctgctacagaatcattgtaaaatgctcatgttgtggggccgacgtgaggactcctgagcctagcacatagtgagcgctgtataaggaggtgacggtcctgaaaatgcactgcagagatctgctgctgcttagagtgtagctgactgctgtcctcatactgaggtcatgcctcctgcaggcagctcccagccaacagcagagtgtggcaggctgtcaacgcacacacattccagagaggcgcagattattttaacaggtgattttgacttgaggactccccattggcctcctcaaacctttttggaactgcgctgcagtccaagactcttcctaatacactctttcatccttcctgctcttcttcccagatgtcaaacttgtaacatcaattgaaggctctccccgtttccatctctcctgttctttccctcagaaaatctcttgtgtgtctaatcctatcttaacatcagcttcatggcagacccaaactaaagccaagtgttcactgttagtattactctccagaagacatttcttccccctttccccatgagaagcctctcagaagccttctcagatggaaactctcatgtcagctaagtgaccaccatttcctccatttcaactcacaccttggagagaagctcttgtgagcttctcagatctatcagcacaggcttgttaagatgtcattttggagtcctccagaggtctctctaattctaggctattggtgggggtttgttcttttatcttccattcagttccctgaagtacattcccaatccagatattactgttgcttctgccttctggtgtaggttacttttctttcaattgctctgtgtgcataagaacaccctccattttaatcatgtttcacagaaaaacctggaactactccccccacccccactgccccacggtttcagaaacttccctcagccttcgtgtcttcttccacagcttaatcaaacccttgggagtgctggaactgagttccggttttcagtctgctgcccagtcaatgctcgttcctttctttctgcagaatttcactaatattactccttcaggggctcccattttatttcctagggccatgtctattcagaatatcaccattgcttgcatgtaaaaaatccgagatacatgccagtattccccagactgtattctgcacaacctgagtgttctgaaagctacaagactgtcttgaaagctgtcttgtcagatgctggtgctctgctgacaccttggtcttaccattgtagtagtctggcttccaactgcaaatatctgtgtctctttgctttctcttgctctagaatgctctgtccatgagtgctgcaggtcggatattcctcagtcagtgactgagcagaagcagatgctctacctgggctcttaattactagctagaaccagggtggtgagtcgcttgataacagaccctttcctggctgccttcctttcctcagctcatgttctcacatactcattggcatttcctccaatcatttcccaaataaactccttgtactggaatgaatagcaggggaatccaaactaagatattgttctagtaaggaaagatgattcatggtcagacatgtctgggaactactaggttaaacaaaagcgagtaggtttcctagctgtaaaacttcaaagaacatttaatacgttgatttatttagtgactctccagggatgacaagtagacagaccatacaaagttatttggcaatgtgtgattgtggaatgcaatgcaagtgcaactgtgtgtgtgtgtgtgtgtgtgtgtgtgtgtctgtgtgtgcacgtgcacacggacacacacacccaggcatccaccacagaacacagcttaagaacagctatgatgtggttaactgaacccaatgttctgggaagagcaaggttttgctttttttggttttctcctcatagtactacttcccacaaaatgtataacgctcattaactcaaggacgtacaaatacgaaatgcataaacacatttttaagaagcagtagacgaggtaatgaacagtgcctactttggatcatggattactatggtgtttggggaacggactggaagacaagtaggctcaggactgacattctcatcttgtggacgataatagagctttgttctttggcacttaattaagcagttctgattgttctccaagcatgagaaaatgcatgtggagactcatgttaatggttctgctctcccaataaatctagttacatatagatccttagccaatttactttttcattatagagaggagaaatcataacatagcatgaactagaactaatttaacattgtacacagtttaaaacttcagtggagttgaaattaagatcattgaaaccccacgagaaaatttacttcctgttccaagatacttgggcttcccagggctaaatggacagtatttattcagcatcctaggtgagtctcactcttaggtctaacattgggtcacatctatggggatttcagcatggcttcacacaatctgtccctgccttcacctctgaggcaccaactccaagaaaaaactgtggatataccggtcaaattgggtcttcaaatatgatttactggggtaccagtatgtgtgtatgtatgtgtgtttgtcttgatatgggtctctcttcagggaaaaagacagagacacgcagagatacagagataaagagagagagagtgggagaaagagagagaaagaaataaagcactcacttccctcaaaaactcatacttgaaagctaaattaaaaattaaatatatttaaacttaacaaatggattcaaaagtcactaaacttcatttaaaaggattttagagctggccatggtggctcacatctgtaattacagcaatttgggaggccaaggcaggtggatcacctgaagtcagttaaagaccaccctggccaacatggtgaaacccggtctctactaaaaatacaaaaattagccgggtgtggtggtgcacacctgtagtcccagctacttgggaggctgagacaggagaattgcttgaacccaggaggtggaggttgcagtgagccaagatctcaccactgcactccagcctgggtgagggagcaagactctgtctcaaaataaagaaagaaataaaaataaataaaaaataaaaggtttttagatttcttttcaattttatttttcctaaagttttttgtaggtgacacatttatatcacattgaacaatagatgaaagcatttgcaaacatccatttaaaagtgctttctccataagcagtcattttatgaactgaatgttaatatctgccaccaccccccagttcctgcgttgaaattctaagtcctaatgtgacgctgttaggaggcggagcctttgggaggtaattattttatgaaggtggagccttcacgaatgggattagtgcccttaaaagaagagacagagagagatgttcgttctcttggctatgtgaggatgcaatgagcagatagtcatctgcaaactagaggcaggtctgtcccagcagggggcctgccagtgccttgatcctgggctttccaaaccccagaactatgagaaataaatgtctgctctttaagacttccaacctattgtattctgttatagcacctcagacagaataagacaaattattttaaaattgttgttaagcgtcacctttattttgaaagagaacattgtcttttcctttcaaaatatctaagaagtagtatatcactgtcagttatttctctggaacacttgccatttcattaaggaaacgtactcaaatgtttttttttaatcattttgtcaactcttttaagtattttgtcataaaatagacattgaaactctaccaaggaagactccatctggcaaaaacttttcctggtcattcctgactcattacaaagtattgcactggttttactacattttacaggttgtggcaaacagactccaaaatggcccctaggattcctacctcctgggaatcacaggcctgtgtaattcctcccctttgagtctgggtgggacctgtgacttgcttttgcccaatagaacctggcacaggggaggagatgtcactctatgattatcttacataagactgtaacttgcatcctgctaaggaactctctttactgactctttcccttgctggcattaatgaattatgctgccatatggaaaggaccgtgttgccaggaactgaaggtgtcctctagcctgacatcagcaggagaggaggctctcagtctaacagccagtgaagaactgaatcctgtcaacaaccacagaagcctggaaacagatccttccccagctgggcctcagatgaggccccagccctggcccttaccttgattgccatcttgaaagagaccctgacacataagccattcctgaactcctgacactcctaccactagcgaccctgctttattttcccctagcacctctcaccatctgacatttgatctatgtgctgattaactccatgagagagtaaggctttgctctgtctgctcttttctccccagtacctatactatacagcaatcaataactaatacacatgttttgcattagtttcataaatccaactaatcattgcagcaatagcttgctttcaaaggatgcagtgcttggatttcatttgtgcagctatatctgtaatgctcacctagattttgtttgtaaagttacagtcaagcagcctccccattaggggttccgctacactgtttttccatcaaacattgtttttactcaaaaaaattactcctatgaagatgttttatctaataaatcttccacttggtggcttataaaaaatgtagtttatcatatattgccttgctgaaacaggatctagcaaatatatcagctgaggcattagaaatatctgtactctcatccatgtaataatctaacattttccactgtataatttatcccatacttttatcttcaagattttactgaaatctcttcctgatttgttgacaatgaaaagcattttaatttgtcaacatatattggttcctatgtatccatttagccatttttcttcaagaggatgaataagtgcttccctaatgagggttttgctactgagtaagagacttcaacagatcttctaaacaagtatcattaagcttagtggaattttttaagtactgggctgagtatatagtacctttaaatttaagcaataaataaataaacaggtagttgtttttaggttctaattttaagtgtcctgctaattgtgatgatatcaaggctcaattacacacccagaatgactttcattattaaaggacaatccatattgcaaactcaatggctacatggtctccctgcttccaccctcactccttttgttaatctcagccagaaaaagcaggttatatcctgtcacatccctgggcagagtttccagtgcctcttcctcccgttcataggaatggcctgagtccttataggcccctgcatgacctcgaccttcatcagcccccagtgcttggatcatgtcacctcccacttttcttctcactcactgcttctcatccacactggccgcccccattgcctttacataacaccctgcccgatggagccttgctccccccacccctccttccctgcctttgcaattgcactttcttctgcttggaatgttctccctttggtatgcacaagactcttttcctttagggtctgctcaaatatttccttaccagagaagcctcccccagcttctcaggcatttctgacactggctcccctgccttattttcccctagcaccgctcaccacccgacattttatatatgtgctgattaactccatgagagagtagggctttgctctgtctgctgttttctccccagtacctagattatgcctggcatgtagaaggcatttgataaatatatattaaatgaaagactatatttcagataggtttcttaataataccgaattttttcattggttttcatctcagtttgaatcaggctgtcattgtttttatcttgtcatgtggttagacatattagttgttgttttaccctggttctcttgcgattgtatttttttggttattttcttcagtccacagggtttgttttttggaggattgccttttaaaacagctgctcattgtgtgagaattggctcagcttaaatgagataatgtagtttctaaattcacctaactgggtgtgcataagtcagtatgttttattatatggaaatcaaaccaatgacaggaagacttgatatggaccccttattgccaatggacagccagcctccctcgaaacacctccctcactgcgggtgacacatgaaggtctgatatttacttacagcacaaggtgcattagtcatgggaggttaggctatgctgtggtaataagtaacccccaaataccagtgtctaaacacaattcaagttcatttatcactctaagagagacagcatggaccagacagcttctctgcatgatctctttgcttctagggtcagtgcaatgtgaaaggaaggctgtgatcaggccaggaggccaatcccattggccagatcctggccacatgaattgatcatagctgcaaaggggtctgggaaatataaaggagcccatgggtatttggtgagcattacaatcctctgcctcaatctcaatccatatgcactaaatagtagtaaagtattgttcttttcattttttagtatgaaaataaaatatttcctttgtctacctcaatggataattttgtgtgtgcatgtcatactctggagatcacagctaagacgctgataacataaaacccatatttaaccaatatacaaaatatcatcttgttttgtgattttctcctttgtcttaaaatggaatagaaaaaaatttccagttaataatagtgccctttaagagattttctgaataatcaagctctattgccacattcacacaggacttgcttgtctctcatgtctcagtaagctggtcaatagcattaacaagcacacccttagtgagcagattatcaggaaaggaagaagacaaagtctatgcccatgtttatgtattgattatgctctgtttcaagatcaattctgcacatcatagatggctcgaaggtttgatttgggatggttctgcctaataaggacaaggaggaagtattaaaagcatctttcttttcagggaaatggaaaacaacaaaccaaaaactcttgctgagtggagggctctgatacattgcctgatccccaggcaaaagagagcattgtcagaggctgacgggtgacagtcaggcagtactgagaggaagaagcagaacatgcaaatgagaacaatatgctcttagcaagggtcagggaaggtgccacccatgtcacgggcctccaagatctttgagtcaagggtggaagatcccacttattcaatgccaagctcacccataggtacttccattttctcttagctttccagggtcacagcctttgttatcatctctgtacatggcctcttaaaatgtgtctatggcttaaaatgtgcctcggccttccgggtcctgagcactgacaccacgcctcctcatggggtccatatccccaggcttggacggattctctttctcagacattccaacacaaaagtcccctttagctccatttccctgtgataagctttggctgcttccaaggctcagcacaactccttttgagaaggcagggagtcgcctctgcacctgagtgttgaaggtgactttcccgagtgtcttcaaaagggcatttttctacttaagcttctggaagtgtgcttcctagagctgggttgcaatatctctgttctcaagatgtatgatgaggtcagtagaacgatctatgatcccatgagccaaacatgtttctgcctttactgcattagggacatgctggtactgtattagtctgttctcatgctgcaaataaagacatacctaaaactgggtaatttgtaaaggaaagaggtttaatgggctcgcagttccacatggctgggaaggactcacaatcatggtggaagatgaaggaagagcaaagggaattcttacatggtggcaggccagagagtgtgtgcaggggaactcccacttatataaccatcagatcttgtgagacttattcaccaccacaagaacaggatgggggaaaccacccacatgattcaattatctccacctagacctgcccttgccacatgaagattattacaattcaaggtgagatttgggtggggacacagccaaaacacgtcagataccaatagtgacaatcaccacaaaatcctcacttattccaataaaaggtgaggctcatcctatggcatttcaacgtgttgatctaacaactgcctaccctgagttatcagtgggctgcctactctagcctctcattacgttatgtgtcctgacttgtggtcttagtttatgtatcttacctactgactcctttaatttctgacaaccctaaatatttttatactggtctttcccagttgctgtgcctcagctgagataggatgctacctactaccctcctgaacagcatctttcctctttctactggctgtgtctgccttctctaacttgacttggtattagtgaaacatgactgacaaacccatagtaaaggaagggagaggaagaaatgactccttctgggttatctcacacacttatctgaaaaaaaaatcagggctcatggttcctgcacaaaagtttactaactctatgaccttgggaaagttatttcatgtatctgaaaatcaagattctccatctataattgtggataatatctatcctatccccatgtggttggtctaagagttagagtgaattcacaatgaaatacaaaggattctggaaatgtaagataatgtcactactctattattgaaaaggtcctggtgctgactttagttcctttattttaaaattgggttactacgtcatttacatactgcttgtgtttattatttaaaagtgtcccctcctttttctgtgtctactaaaatcacagtcatgaactgaccttctagttacattttgttgtcattgttctgttgttacagaggaaaggtgtatcattaacttgccttctagatatgaaccaagcatgcaactgtttgcctggcactgtattcaccatttctcagtattcttctactctgcctgtctgtggaattaaaggcccttccagggggcacactgggatggtggagctctgcagatttcagggttgtgggagaggttagagagctgctgggataagtattcatgaacaaaccaggtttttgcagaaacaaactcttcatactgaaaataaatgccactaggtacggaacctcacattttaatggcacaccaatattggtcttgtatatgcatatcaaataaaaatgactgagtaggtatttccatgtagtggaatactactgatactcaatactcagagaagtgcatttgcatagactttgggatgtctaatttacacaaagaagagggtaagtgtgagtttaatgtttataagataatgttgagcatttacttttagcacttctaatgagctaaacaaatctcttcattcaacaactccatttgaaagataaaaaacagcatttaccttgtacaaaagtcttggagctctgccctaaatggcaaaagtcaggcaagagaattggttgtaagttttctcctaaacatttaggctgggcatttggctctttgctgggcagaggaaggggctgaactcaggataaactcaggaagggaggagaaattaaagtaaacatcgaatttgctgtcattgctcacaagaactattttaaaaatcatgaaaaactactgactttggacatgcatcgtggctgtaaagatcaatgaatttggccataatgttcaatgagtatttgacatggtttggctctgtgtccccacccaaatctcaccttgaattgtaataatccctatgtgtcaagggcagggccaggtggagataattgaatcatgggggtggtttcctccatattgttctcatggtagtaaataagtctcacaagaactgatggttttataaatgggagtttccctgcacatgctctgttgcctgcctcatgcaacatgttcctttgttcttcctttgtcttccaccatgattttgaggcctcctcagccatgtggaactgtgagtccattaaacttatttcctttaaaaattacccatttgggggacatgtctttcttagcagcgtcggaatggactaatacagtatttatagaattaatggatgaggttagggcaagaagggcgagaatgcagtaggagtataagaagcattggtttccgagattcacttgggcccaagcttatgctcccttttcctgtctgctcagagaacactgaagagcatgctctgccacaagaggaggtctttgaggacttctttgaagtcccagagggggtcctgagatccaggaatcgagcatcaagcggctctcagatttgtttatatgttttggccaatgccatacattgtatggccttaatttagggtaaaaaaaatggctgctttagaaaaaatgttttgggcatagaaaaaaagaccttgattttttaaaagagattgtttattaattattaatcaaaggcattttttcaggacattaggtcaggttctataagaagtgtgatggcttattttttttctcttagtaaggctacattctacctgagaactcaggacctgaggacatggttataggaagaaaaatcatagatgaaaaatggttaacaatagtcagtacttagcattgattcccacaatatcattatgtatatttcaattcgattacagacaaagccattaaaaatgaattcttttagttctttaatttattcttaaattagctataccattttttctttgaaatattttatgttctttttcttttaaaaaacttaagacattttatttttaattattgtggatacacaataattgtatacatttatggggtgcatgtgatattttgatacaagcatataatgtgtagtggtcaaattggggtaagtggatgatccaccacctgaggcatttatcattttttgcattagggatattccaattccactctttgttattttgaaatatataagaaattattaactacagtcaccctattgtgctaccaaacactatgttttattccttctatctaactgtatttttatacccattaaccatctcctgttttctctctctctctactactcttccaacatgattcaaaaatcaagagggacaaaaggtacacagtaaagtgtcccttctacctgtgtctcccatctactcaactcctatccttggcagcaaacatgttgtcagtttcttatttatcctcccagaggtatcttatatctattttaaaacacaatgagaatataagagaagacagctcttagtcatagccatcccggacttcttcccaacaggtacagattgcggagtcttatttgtcttatccagggatcttggggaaagggtggctaatatttgaaccctcttaggggcagattctaagaaagtacatcttccccttcttctgggatttcaggtcagaaaaacagacacagaagcagagataatggtgactctgtagttgtgggatccatagctggcactgaaaaaatatatagtatatcattataaagcttttaatttttataaattcaaatgtatgttaaatatatacatagtatcagtgtccataatatcactatctgtccctcccagaggatctccaatgttatttatggtcctaatgtcggaggacaaattatagaacagtaatgactgaaacagagccagcctgtcctcaactctccccatgccattatgtatatttcaatcctattacagacagagcaagcaagtccagaacgaaaagtaagaattgtgccaatcaatcagaattagttttacctaaatgatattatgagatgcaaaaatatggctttagacactgaaattagacactgaagctggtgtcctctgtgcagagaatgctaatgctgagattgtggtccctagtggcaacaccagctgccccactgccgacccgtgccctgacgctcttcttggaaatcagcttgtcaaatgttgggagtgctgcgatgcgtctgcacggatccatttagaactccttctcattcgcattcatcacagctggcatgaattcacaagtgatggcagcaaaatgtttctgccagtttctaatgcctcttagaaatatgggcgtttttaacaagtggttgcctgactgctaagcaaacacactgagataatttctctgaaaagagagctcattgttaaacacggacacttctggcagtattcctgctaatccatccctgttcactgtgtcactgtgccagcatcatgtggacataagaatggatgccatagctgtccattatttctgacatcatggcaatatgttgggtggaaaatagtagttatttcttcaacacgtgaagaataatcatcaatagtattattccagcaagagatttaggtgaggtggaaaaggattggcccacacttctctgcccttctctccatggcataaataatggtgtgttccagggaaattgtttgaatgccgcagggtacttctggaaacctaaacttctgaaataatgctgcataacttcagaggtgggtaagaaaaggccatgctgagattgacttgctaaagaagttacacgtgggtgttctggctaacagcccagctgacctggctgcagccacatgtaagagctaccttgagcatccagcttagttgaactttcaggccccactggcaactgactgtttccatacaaaagactccaaaccagaactgcctagctgagtctttcctgagttcctgaactacaaaatcacaggaaaaataaaatggccaccattttaatcctctgcattttggagtaacttttaaacttggcaatgatgattgaactgatgctttaaaaattaaaatgtaagtattgtagaaataaaaacattagaagaaaatctaggagactaaaaatacaatctaggaattcaggagattttaagtgagttaaaatatccagactggatttatgtagatatatacacgtatatgtatttattatatgtatatacacacatgtatgaaaacatatatgtggccaggtgcggcggctcacgcctgtaatcccagcactttgggagcccaaggtgggaagatcacgaggtcaggagttcaaaacagcctggcaaacatggtgaaaccctgtctctactaaaaatacaaaaattagctaggcgtggtggcatgggcctgtaatcccacccacttgggaggctgaagcaggagaattacttgaaccgggaacctgggaggtggagctcgcagtgagccgagatcagtgagccgagatcacgccgctggactccagcctgggctacagagtgagactccgtctcaaaaaacaaaacaaaacacaacaaaaaaccatacatacatatttaacatatatttgatatcataaaaaattaaaaactttataatgatatctattataatcagattaaaggagctatggatttggaaaaatatatactcaaaaaagccttagattaataagaaaataatgaaatagaaaattgggcaaataatatgaataagaagtttacagaaaatccaactcaaagaagcatcaaatataagggtaaaaatactcaaattcactagcagttaaaataataagacacaactttagattgcccaacaatagaaatgaagagcccctatatggttgagaatgtgaagtgggtacacttgacatagccaatggaaatatgagttggtccattctctttggatcaagatctggtgagatctattaaaattaaaaaccatatgctctttaatcaccaagcccagtattaggaaactatcccagagacaaaagctcactacgtagggacagaagtacacagatagttaatgtaactttgtctcaagacatgaagatcaagtgaatgcccattaagcaagaaatggcagaataagctatgggtataagcacaatgtgaaatcgtatgcagttataaactattaaaaaaccagtaagggcaatggcagttgactttcaggaaaccaactccaagtgtcattgctgaatgagaaaagcaaggttcgtgggtgtgtgtacaatgtgattgcattcaaagcaaaacaaagaccatgaaacaactgtgtacgtgtttgtatatgattaaatgaacatggagaaaaacacatagggagatatgacggggtgggagaggcaagcaaaaaatgtaaagtgtacactgaaaatactaagcacatacagtatgactaccttcatatagaattacgtatgtgtatgcagatgcataagtgaggagataaaatatagatctatattcacttaccaattaagagtttttgatatattcattgaaaaccagtttgagaaagacaaacaaaaatcctgaaaatgtgtataaatacttgtaaatgatttataggaaaaggaaaaactgtggctgaagaatgagctattaacattaggcccccaggatggtgaagctggagagcagtctggggaagaagattcgcttaaaaaaaaatctttgcattgctctagttactccaacaattatgcattacttctgctatttgaaaaagtaaatccaatgccaagactttgagtattgccaactttccgtagctattggtgacattgcctgttttatagcctgcctctggtgacagtaaattgaattttgatcaggtaaaaaccaaatttaagcctgctctgtgcacctgtcaattacttgcttgaaatgctttaaatcactttgcttgaaatgccccctgacttctggggtccagttatacttgtggccattggtaaagggtgactttccatccgcttttccctggctgagattgaccatggcgtcagtcctcgtgtggtctccctgagattgggagggtccttccatgtccctcagtcttagcctgggctctttgttctggctgaagttggcattcgggtcaggcacctttcaggctgacatacatattatattaatccatccatcctgcatgtggatggggagaatgcatagcaccctcattgaaaatttgctttatctccctttgctgattatgttcttatcctttttgatcttttcttcaccctcctcctttcttttgcacagcaggcaatgggatggtgactctttatatcctaatgccaaagaccctaaggtcaaccagctgctgtctactagcctccttcaagagtcctattgctaatggttagttttttataccaacttggccaggctatagtatccagttactcactcaaacactagtttaggtgttatgatgacattttatagatatgtatataatctatatactatatatctctatatatagtatatatatatacactatactatatatctatatatactatatacatctatagattatatgtgatgtggtttatatatatgtatatatgatatacatatgtatgcatatatgatatacatatatatgcatgtatgatatacatatatatgcatgtatgatatacatatatatgcatgtatgatatacatatatatgcatgtatgatatacatatatatgcatgtatgatatacatatatgagagatgccaatatcagttgactttacataagaagaccacccttgataatgtgggtgggcctgatctaatcagtggaaaggccttaagagcaaaaccgaggcttccctgaggaagaaatgtctgcctgtggaccacagagtgacttcctgctggagagtttctgacctgcccacctgccctgcagatttcagacttgcccagcctgacttcacaatcgtgtaagccacttccttgaaataagtttccatacatgtcctactgggtctctttcactgctaacatactgacaaatacatttccccttcaactcgattgacctggaaataggacctctaagtcatctctttaggaaaaaaaaataggaggaattgggtgaggtgggtaagaggcctctctagttccttctttcatcggtgagtctgctctgtaaattggttggtaagattaataatttgtgactttgaaaatattatcactcaaaaaaagacattatttaagactttaatgaaacagaaagctcccctaaccctggaagagcaaacaggaacacaggaagcgttcacagctggctctcatggaggcctgctttccaggtacctcccagacttaggtctgcatctccatctccttctcaccaagctgtgacatcttcatcagtttataaagaatcacttcacacctgtaatcacagcactttgggaggccaaggtgggtggatcatgagatcaagagatcaagaccatcctgaccaacatggtgaaaccctgtctctactaaaaaaacaaaaattagctggatgtgctggcgtgcacctgtaatcccagctactcgggaggctgaggcaggagaatcgcttgaacctgggaggtggaggttgtagtgagccaagatcacaccactgcactccagcctggtgacagagtgagactctgtctaaaaaaataaaataaaataaaaaatccatgcctctccatgcaggaacacagcctgcaggaccagtgcagagagccttggggaccccaagtcagagcccctttgagatctcattgacaatgagggctatagatgtgcctccttctccacagcatgacccgcagaaactgtcaggtcacacccctgacccttaagtgcacaatcatacctcatcccaccccgacccaagacagaaacacattttcagaggaaggaaggggatggtattttacttgcctctgtataggctctttcaccacacatacccacaccccccacccccacacacacacgtaaacacatgcattcacacacatgagtacacaggcacagatgcaaacaatgcacaaatgtgcaaactcacacacacacacacacacacacacacacacactgctattgcacatgacattgtgaggtgttggccttttcactgatgctctgctgctctcacgttcacagtgtgtcctcggatctgctggaaatcagagccagtccaatagctgcagaaaggtccaatcatttccttgtaattactgcttgtaagggtgagttaagcattcagacaatggtcatctcctgcaagtctctctctagttacagaaggcagatcttcctcctgttcagttccatcaacttaaattgtaaaagacttgctttccagagggaatgtcatgccccagtacttgttacctctagctcctgcagaggccagttcagctcattctttttctctttgatccctgaccttgtgagacggtctcccacactccaagggggaagagttactcctagcctcctggattcttctccatcacatttgccctcccccaggccatggagctggagctgcagctgcccagcctggagacccacggaggaggctgggatgcagggtgaactgtagccgagggccacctctgcctctctcctagcccacacagaacctcgctctccttccagacaaagcggccacagatggagaagtaggtggggagggctcatctttccccccacttctctctctgtatccatgcttggttcaaatgaaccagaggaatggtaataaaggcctgctctggatgccagcagtgggagtggaaagttgagaatagatgctagaaactctatgatgtaatctttttacattaaaaattttacgtagtaatgccaagaactttatatctttaatagtgtagaaaattgatgacacccatttccttgagaagagggtcaccctctggatacaaactaataccacacagagtttctggatttcattctcctcaaaatctctctgccccagtccacagtgggtgcgagtttcttgcctctctctcagctgccactcttctgctgaggcagagaagttttctcatcctctgggtctccactataaccccaacttgcatgccccaaagacacgcacacccttcccaaaaacccagcagttctctgtgagtctggtagaaagtccccattatttgtggacctactcagccttggtgagtggctggtcccaacaggatccacaagaaacttgcatgaccgcaaggcctgggcacaagacaaacccttccactgccatgctgccattatggctgttgtttttccatatggtctcacatggcctctcagcaggggacgacactgatgggatttttatgggtctgtaaataaagctctttctttcccactggagttgtaaactgagaagtagacacaagaatcagacagatggagatcaaaacgtcagctttgctgctgatcagaaggaggtggctggatgtggtttatgccttcaggttgatgggcttgcgcttatctgcttgtcccttctcccatctgatttcttgtggagcccatggaggtaaagttggtatttccaaatcagacattttgcccaaaattgctgcccctctctggttctgagtggaaagggaagaaaagaaatcaaatctcagttacttatagttttccagtagatcagcctcaccaatcatgggccatgagccaatataatctcccacagactgagacctccatcccccatggtgaggggctagtgagactggaatacgaagagagttgctcaagtggcattccctcctcatgtaattatgaggcacagggaagaagagggccctgcctttttgctccctgaatgcttaacctttagattgaagtgttaagtccctggttggccagggaggcaccatcttgctcttgcggctgctcacttggcaaaagctgcccctgccttcagccacccactccccaatatcagccactgtgtcttgagtgtcttccggggactactgccagggagtatgtattttgttctcagaagctgtcacttgggtcagaatagtaaaatattcaaattaagtttgagccacactgaagtcaaagttggaaatttattttttctttctttctttgcattcttttccaacaatattgcccaatgtagcttatctgagattctgcaatgtgattaaatgtcaacattaatatgatctgggaataaaatgccaacaacccaaagttgaatctaaacctcttcttttattaaattctcttttaataggttaggctaggttggctggctgtattctggaccctggggctctcaaatagcagcaaacaattcccagatctcatggcttaacactaggaaggtttgtttccatggacttcactggccagcctgggctctgccctgtgcctccctggtcttcactctggtgcccagctgagagcacagcagccatgtggaatgctgctggccgtgtgccagagggaaactgagcttagctaggcacacactggtgcctacagcttttcctggaagggaccatgtccctactggtcacatttcatgggccaaagaaagttacattgcaccacctgagttcaagagggcacacaagtccaatcctcccttgtgcctggaggctgagagctgaagtagcttgcaccactctaaggaccagcagagattctcagaaagaaattaaaagaggcaactaataaatatgcttggaagttaaagttcaaataattctgtgtcttcagtaaagtctaaaattaaatattcttgctcttgtgaagtcaaatccaaagtctataattcccagtcttatattaatgtccaatgaaattaaggccttcctccatttctttctctgtttattggatctctgttctctggatctgtttctctgttctctggatctcttcaacaatcagatgtgaactgggctacccttcaacatgatgtgcttaatgccttcaggacttcagaggatgcattaggttaggtcaatctctcatttcccacttgaaagagaagaaaatgatctttgcaccgccaagattctcacagcactgacattccatcaccagctaacttcattgtctagaggaactacctaatccaaacatgctctcgggacatcacactcggtaaaatcttggcccgtgttactgatgccaaatacgccatggaaactccatgggatctgagtgtaggttgatgtacagagaagaaatcatccttgtttttatctctgcaggatacctttggttgcagagcactgtgactggggcagttaactccattgcaagaactgtcccttcaccaaaccaataatggccctacttaacctgtacatattgtctccttccccagagaggtatttgttgagaaatatttgagacattgctatcttctttcaaagtatagaaatatacagaggtggcacactttcttttgcaccttgggtgtcatttcccctctagcccagtgtgtggagtcccctcaggctgctctgagagttggtcctctatagtgtcatggctgccactgaatcttacaggcatgtgtgcagtgctgtgacagagtgaactgtttctattgcctcttgttttgaaattgctaagacccgggaagcctggttccaggggacaatttccctctagtcctcatgttggttttcaatcaagaaccatccttagaacatttccaaaccaaagctgctgttattgcttcgagagtctttgctcccggagcaccactcctcacctttggctgcagcttggaatcccttgggggactttaagaatcctgagggccatactgtacccaaccaattgagtctttgggggtgtgtgatgactaattgtatgtgtcaacttggctaggccatggtgcccagatttttggccaaaagccagtctagatgttgctgtgaaataatgttttaggtgaaattaacatttcagtgaatgttgagtaaaacatattaccctccataatgtgggtggacctcatgcaatcagttgaagtctttatgagaaaaggctgagattcccccaaataagagggaattctgcctccatacaagcttcagcttgagccgcagcatcaactctgccctgaacctccagcctgtcagcctaccctgcagatttcaaacttgccagcctccagtcttgtgagccaattccttaaaataaataaatctctctgtctctatctccatcactatctctctatccctttatctctatctctgtctctgtttatctctatttctatttctatctgtctctatccccattcctatatctatctttatctctctctatccctatctccatctcgatctttgtctctgtctctacctctatctctatctacttctgtctctatctctatccctagctacctctatctctatttttatctctatctctcttgtcctatttccatctctatctctttctgttctatctctctctgtctctatctctatccctatctccctctatctctatcccttctctctctctatccctatccctgtctctctctatccctatctgtatctgtgtctgcatctctatccctgtatctattcctgtctatctctatctcgatctctattcctgtctctctatctctatccccatctctatctctgtctctatccctatctttctctatctcaatctctatcactatccctatctgtctctatccctgtctctacctacctctatctctatgtctatctcttctatctctatgtctataactagctctatccttatctctttctctatgtatctctacctctgtcttcatctctatccctatctccatctccatctctttctttatccctatctctctgtctctatctcctctatctcatctctgtccacttcctgttggttctgtttcttggagaaccctggtgaatacaggtggtgctgatcttccaggcactggtagtgtttagagctttcctggtgactacaatgtgcagcagggtggacagccccttcctgagggatctaaaaaggaccatccccctttttctctgcttcatcttttgttatttgtttgtttgacaattgtaggggttctctccatggatcgcgaccctctcctgcccctgctatttccagaaagtgcagtggcatttctgacagtagaacctcatcttaagatcattccccttctgtatcaaatgacttgctcttccatgccttgctccacaaactagcagcatcagtcttacctagagcatgacagacaagcctagatattgcacctactgagggatgatgtcctgaagtactgcatccacagctccactgttctctcagggtccatctgcagctcatcctccctttcacatctgcccaatctcatctcccttcctgcatgccctgcctcccctttgaaacatcagctttccttccactgaaatcactctccttccctccagtttaattagcctgactgcctaaaaaaaacaaacaggccagctgcagtagctcactctcataaggcgaggcaggaagatcacttgaggctaggagttcaagaccagcctgggcagcatagcaagaccctgtctctacaaaaactaaaaaattaaaaaattagcttggcatggtggtgcatgcctgttgtcccagctactcaggaggctgaggtgggaggatcacttgagcccaggagattgaggctgcaatgagtgacccatgatcctgtcactgcactccaggagcaacagggcaagaccctgtctcaaaaaaattataaaaataaacaactcttctacagctccttttcttctagtaaagtgaagtacactttcatagccttctagctcctccttgattcttctagcaaatatggcatctataaagtaatccagatgcaagacttgtcagtgcacttctaacctttgggttcacaaacactgaattaagttgtttttttgccactccactaaaaaaagacattaaaaaagtgctgccattccttcatttaattttcatggaagattcactgaaatgatctaatttctttgtctgtattttgactataaagctaatacatggctttattcttctttatttgttgatgattcaaatctactatacttctacaattaaaactggtctggaactctaaaatcgaaattcaggattacagtttatgcagctaaaaattgcaaagccaacttgagatcacacggtggtggtgattggggtaatggtggagtgatgtggtgatcatagcagtagtgggatggtggtagagatggtatgatggcagtatggtggtggcaggaagatgctcatggaggtgacagtaaccatgatggtggaaatggagcaggaggtaaaagttgtgatggaggtaggggtgggggctgtgatggtaatggtaatagtgatggtgatggtggtggtgatggttggtggtggtgatggtggtgatattggtgatggtgttgcctgtgatgctgtggtagtgatgatcatggtggtggtggtggtggtgctaatggtgatggtggtgatggaggtaatgggagtggcagcattggaggtgttgaggaggctggtggtgggaggggaatggttgtgacacagcctctggacaaggcacatagtaaggagggattcatccctcaaattcctctcaatgcctgcatacacctactggaatttgggacagtgaagcagggagtgtgggacagatgctgctctgttggcctggtcctaccgattcaaaacagaatatgaactcaccattgcctcctgaaccacacagagcccactgactattatttaggggccttgcctagaggccccactgaggtaatccagaaaggggcaagtatgttttcatcacaaatgccaagacagcaccaggctggctgctctcctggagtccaggatcaagctgcagtggctcccacggcagcaggcatgtgctgcaagccagattggaagcagttttgctaaggttcttccttattaaaacaagctctgttctgcactagctgctggctgtgagttcagagggcatgggtttatggtggtgccagtagtgcctatttgcagcggttccaagcagccatttgaccagactcccccagcaaccttttcaatctcaccaattcttgtttttcttggggttctcagctcatgtactaaaggcgtatggcaaatgccctctatacatacattccatacatgaaatgtgggagttttagggggaatttaagcaacacccctctgatgtcatttctgaggtatttgaatggagagagcagggcacgcagggatgaaaatacgagtttatccctgataagtgctggcttggaggacacaacttaggtgggcagtcagatgggctgggtgcttccttctcccccaactctcctctccccagctgtctagcccttggcacacttactccaggcttgtgtctccctaacagattcacttaccctggttgctggcatgcctggccattggaagaaagggaaatttcttcctttttttttttacattctttccctcaacaaactttattgagcacctagtaactgccaagcctggacaagacagaaaataattttgtttttctgatacttatgtttcagcggagacacaagtactctttgtttgattgccttttgctgaatgtgcccagttgaaactcactttttaacctgtgaggagagtgataaaaggacatactctttgggaggctgaggtgggtggatcacgaggtcaggagttcgagaccagcctggtcaacatagtgaaaccctgtctctactaaaaacacaaaaattactgggcttgctggcagtcgcctgtagtcccaactactcgggaggctgaggcaggagaatcccttgaacctgggaggtggaggttgcagtgagccgagatcgcgtcattgcactccagcctgggcaacaagagcaaaactccacctcaaaaaaataaataaataaaaataaaaaaagacaggctcctggagcttccttctcaggggaaggaggagcatccacttccccctagtcattcagagaggtcaaatgcagtcctctttgggaagtgactggatgtgcagagaaagtcagagggaggtctcgccgcctctcaggctgcttcgaaggatctcagtctgtggaccaatgggcttttctgcattcggctgccatggcttgtggcacattcagcaggattggtttctgacctcccatcaggctgggagcaccccaccgtgtatgtagctcaataccgagagatttgtaaaggtttttattgaatgactctaaggttctaagcctgggtaacttgggttataacagcattcataaatggaaatagagatattcgaaagacacttttttttttgagggagaaactgctgagcgcaggtttagacttcgtgagatgtttagaggacagcatattattttttgcatggctggatttaatggttgttttgcatccctttgcagggttgagatagcagaggactctcagaaaccctcacacccagcattaagaggcacacactagatcagtttgcagatacaaatctttgtggctctatactttctttaaaatcaattcccagtattttaaattcctcattattcctctatcatgtgttagacaaatatgatatccacagatctacaaatggctataactatgctgtcactgcagggatgtcttgctctctgaactgtcgtcaggaagcttataaataaatacgggacacatgaagctaatttgataccaacagcaataatataaactctgactaagggaaaattggaaagtgttgctgatctaacagcacaaagaggcattaggaacgtgcgtctgcatgtacctcactcccaggcttgggctctttcccataacatttggaggctgtgatttcacctaccaaatacctatttacatgcttagcctttggatcatataattcacatctctgagaaaatgatgtattgttacctaaatgtatcactgctaaatgagatcaactgaagagtatgttattattggcttcaaactatgagttggaaatgtccacacacttgcaccttgctttggtgctattatttgtttttgattttgttttgttttatgtttttgatgggagagtgcggggcgtgatgatcatggctcactgtagcctccacctcctgggctcaagccatcctcctgtctcagcactcttaggactgactacaagtgcacaccactgcacccagcaactgtttttttggtagttacagggtctagctatgttgcccagcctggtctcaaactcttagactcaagcaatcctcccacctgagcctcctgggtagctgggactacaggcactcaccaccacgctcgattaatttttatattatttgtagagatggggtttcaccatattgcctaggctggtctcaaattcctaggctcaagcggtctgaatgcttcagcctcccaaagtgctgggattacaggactgagacttcatgactgtccagcgctgttatttaaaatacaaactgagttctctacaaggtggaagttttaataagtgatgcaccttgtcagagtaaaagctttcagtgggggaaaatgtgctttaatttagttcatctaaatttctccacactctcagcacagcgattatcttgccttctatatcaccctgacacatactattaacctatcaaacagcagaaggctgagcaccaccaggctccaatctatacagatagttgggccaattcaggtcaaaattttattggttttggcctaaaagctgctggaaaaacttgtaaaatgaagagaagttacaatgtgattttaaagcggatttcaaagatgagaacaggataatatcagtttctggctgcaaagttttcttctgttaaaaacctataagttaaataggcacacaaatatatttctatgctctttaaactactgggtataaagtgatcacaattttaagttgcataaaaggactgcaaatattaaaacacttgactacaataaggttccttttgggccttaggtaagtaatgttttctggtgttgttccagaaagcataataaataaaataaaattatcctttgatcataccaaggggtttgtgacagtgtgtattagcctgttttcacactgctataaagaactacctgagactgggtaatttataaagaaaagaggtttaattgactcatagttctgcatggccagggaggcctcaggaaacttacaatcatggcagaaggtgaaggggaggcaaggcacgtcttacatggtgtcaggagagagagcaaggtgggggaactgtcacacacttttaaaccatcagatctcctgggaactcattcactatcatgagaacggcatgggggtaaccatccctatgacccagtcacctcccaccaggtccctccccgacacatggggattacaattcaacatgagatttgggtggggacacagagccaaaccatatcacagtgataccacaataagatatccataagtgtcagtttcttaaggcaattttccaaagtaccccacatcggatagttgaaatatctgagatgtattgtcccacagctcggaaggctggaagtcctagatgaaggtgttggcagggttggttccttttgaggctgtgagtggggatctgctccagggtcccctccagcttctgggggttccttggcttgtagcaacatcactccaatctctgccttgtcatcacatggcctcttccctgtatgttcgtctgggcccaaatgtcccattttcataaggacaccagtcacactggattaagggcctatcctatctctgccttgtcatcacatggcctcttccctgtatgttcgtctgggcccaaatgtcccattttcataaggacaccagtcacactggattaagggcctatcctacctctgccttgtcatcacatggcctcttccctgtatgttcgtctgggcccaaatgtcccattttcataaggacaccagtcacactggattaagggcctatcctactccagtagaacctcatcttacctaagttacatcttcagtgaccctcttttcaaataaggttattttctgggcattgggactttaacaaatgaattttgggggaatctgatataaccgatcctaccccccacagtgatgcttgggcacctcagggagcacccccctctcagccctgcatcccagtccctcatcccacctcctgctcctggctttgttgtgccttgttccatctcacggcctcacccgcacaccgccattttggttgggctgtctgctttgtccctgaacgctaccttctaatcttcccttgactcctctcctgctcagagcccaggctgcctaaatcccagaccagggatcggactctgaggagcccccatttattcagtaagggagtgtctctgtccccttaataaactgttatcctgcttcttgactcatggaggaacagcaagtcctgaagaaagatgcaggaacaagggacccagaaacccagccaggtgggcttacggcatctgggaaactgtgttttggaacaagatttggggcctatttgtgagcacattgtcctaaaggcatttttgagcccaggataggtaaggaaatggaattctctgctgagatcactattaatatcttacaccacctagaaaaaaatggtgtctaaaatatccaacctgtcagacaaggagctttgattgaagatgcaatcacacagccaagccaatgccagctgacaaaaggagtttctggggtgggaaatgggtgggatgtgtccagggatttaaaacccaatccttgcaggtttaaacgaagtatgatttttgacaggaggttctcagtggagtcttgtatttttctacaatttttgattagggcctcatggactggaatctacctattctctgtctggagtcatagggtgctagtgggtaagtgtgatgttttcataggtagcagttctataaggtctcctgtacagtcatctgtggtattttcaaatgtttacctctgctctataaagaatttgggtcacttttgactatgtaagactttggtctgaattatttagactaccacccctactgcagtagtattttagaattccttctacaacttcagtggctatgacatttactaatcttggcatatgatttctgaggaagggttgcttaaaataaatacctaggcgcccagatacagaatttagctatggtgaaatctcaactgttcagtgtctcctgaaaatcagtgatatcttctggatgaccaaattgaccaaacacttgaaggctaaacttattcttccccagaacattaaaatctaagtttcacttgtatcgtattttgtttttgctggaagtgtgggctttcttttaaaatagctgacatcaatcaatcaaaccagtttcttaatagtttatcatggtccccgggcactccagttattttgtcatgtttccttgtggctccggttgtattaacagatgcaaacttgcatgtagaaggtgtgagggcacagagcatgttgcacatctgtatagagcttgctttcatgggaatctgttgatattaatttcagatcatttttcttctcatcaagatgaagtgaggcacacaaaggccacttggttgaggtcattccccagcctctctgcagacttagagaatcaagccctgagtccatcttccacggagtgtttttcttaccttcctaaaagagactcatcttctgattagcccagttacctttggtatcttggacccatctatggcttggatctactttcccatctctagttctttatgaaaggttcacgaggatttttttctcccttctacagtaatttgtgctaggagagggtacagactgactctagatcaggggttctcactgggggtgattttatcctcttccttggggatattgagcaatgtctggagacattttgattgtcatgatgagggggtgaggtgctaaccctaaccctaacccacctagggagtgagtggaggtccaggatgctgctcaacatcctacaatgcacaagacaggcccccacaacaaagcattatccagttcaaagtgtcaagagagttgcacttgagaaaccttattctaaagaaaataacactttggcaacataaactgagctacaatctctttcaacctctctttatctgtgataattcagagtattaacctctgttagcaattgcatcttaatattaaagttcctataaaatgcctccctgatggataaaccttttcatatagtttcttctctaacacacgcttcgtaaagcatgataatccataggttgaatctagtaaaggcaggaagtgaaggtaggatgccagttaaaataaatacatgcaatgttaactctgcaactggaaggagaactcagatactgtcttgcgctggttgagacaacttttttcaggtgtcaggctggtatctgcattagtttcccagggttgctgtaaacatggacacaacttgagcagcctaaaaacaatagaaaggctgggcgcagtggctcacgcctgtaatcccagcactttgggaggccggggtgggtggatcacaaggtcaagagatcgagaccatcctggccaacatggtgaaaccccgtctctactaaaaatacaaaaattagctgggcgtggtggtgcatgcctataatcccagctacttgggaggctgaggcaggagaatcgcttgaaccagggagtcagaggttgcagtgcaccgagatagtgccactgcactccagcctggtgacagagtgagactccatctcaaaaacaaaacaaaacaaaacaagcaaacaaataaaaccaatagaaatgtactctctcacacttctggaggccagaagtaaaaaattcaaggggtcatcagggccatactccctctgaatgctctagggagagtcctttcttgcctcttcagctgctggtgttgccagccatcctgggcattcatcagcttgttgttgcatcactccagcctctgcctgcgttactatttggacttcttccctgtgcatttccaaatctctctcttgtaagtcattggatttaggactcattctcatttagtctgacatcatcatactgtatctgcaaaggccatatttccaaataagttcacatttataggtactccatggagattagaacttggacatatctttctgggtgacaccattccacccacagcagtcagtagccaggatgtatgaggcactttacttccccacaccacagaagtccttttgtccctgtcaatcacgcaccgtctgtctctggcagtggcaatgttgttgctgagtcagattgctggtggcagggttgtcatttgcttgtcttcatcatgtatttcagcctcctgtgtcttttcctcctctttcttctttattttcccatcaattctccttgtctgcctgattttaccaccagaagctaatcatgatgcactttcctttatgataaagatgctcaccccattcactgagcatgggatccgactctttggatcttcttggtggtattcatttgctgcccattgcctgggagcacctggtaattgcagaagatattttcctctaagtgcttaaatgctggcagtccttaggggaatctgaggcttccataaaactggacttcagatgacaaagccatgctacattaatagctctagagatctgcagttgggatggcttatctttcagatgccatcattttggcttttaatttgtttgcgaacaatatcctttggggagctgcatccttcaacgtctgcctgcattatcacatgggcttcttccctgtgtgtctccagatctccctctcataattcatcggatttagggctcaccctaatttagtttgacctcattttgattatatctgcaaaagccatgtcttttacctgagggtaacagatagtaagaacttgtgggcatcacctaagagcagggagtgaaaaaaccaactgaggaaagaaaaatgcagggcccaaaaacctttttaaaatgtatttatttatttgagacagtcttactctgttgcccaggctggagtacaatggcatgatctcagctcactgcaacctctgcctcctgggttcaagtgattctcctgcctcagcctcccaagtagctgggattacaggtgcacaccaccacgcctggctaatttttgtattttcagtagagacagggttccatcatgttggccaggctggtcttgaactcctgacctcatgatccacccacctcagcctctcaaagtgttgggtttacaggcatgagccaccacacccagcccaggaaaccttttaattaaacaatgtagtcgaggtctgtgggaagaggcagaagggataggattgtccccaccctctgtcaatgttcaacagcctgaaacccccatcttgttgtaaccctgatgttgctgtgtcactgctcaagcagaaatacagaatgtcaataccagagcaaagatggactcttgagctgtgttctattggtggaaccaagggctttagttggagctacgaaagcggcataagtatacagaggagtctagacagtaagcctgggcaagccaggcaatgactggcagaaagacaattattattcctgccgtgtgtgcaagtgcgtgtttggaggggaaagatgaggtctgattgtcttcaggctttccaccagattagtgtttcccatgaaacctggaggttcatggacgtggtcttttgggggatggttccctgggtctttttttgcccttgtaaaatattgacaggtaagttttcaacaagaatgctgctgtcgtctatcttgtttaagattgccaccttcctctgcctctgaaatctccataccacttctgtgctttattttcctcctaaacataatcattttcaaatatactatatatctactcatgaatcttgttgattacttccttctccttaggacgtgagctccacaagggcagagggtcttgtctgttccattcactgctgtgtcttccgtaaatgagacacatggcccctgggccatcctggcttcctcatccttcaacccttcaacctgcacatacttgttattatgtggggtgtgattttactagagggaaccattcgatgttgcacatataagggatttgtaaaatgggaatagcaatagtattgagccgatgtggctgtcgtaaatgagtacctgtaaacaacagcaacaacaacaaaaaaaacccagaagcagcctgacctagaatgagtgcttggcagtgtcagcccactcaccaagaccctctgatggtgcttgctcaagccctggtgctctgctgccgaaaggaatccatatgtttgggtttccaccaagctgaaatcttaattagcataatatgtaaaatcgtgtcagtgttcagtttttgctcccttcccccgccccccgtttatatttccttaacttttggtacttggtcattgcttctctgttagggaaactactaataggagggaaaaaatgctaaaaatctttcagggaagggggaatgatcatgcttagttcaacaacttgcatttttaaagatttatgcatacatctggttttgttttctttaaaattatccttggctttataaatgcctatactcaatccaattgaatatatcaatgtttcctggtcttccataattgcatcatgaccccaaacacttagtccactcactaatttaattgtttatgtctggccatccaggcagacccatgcccttggtatgtgagcatgcttatgcataaggttagcactaacaggcgttagatgctttcagctttgctatatgttgtaaaactaatgatgatttgcagaaatgagtaggaatatacaattactttatggtcaaaaatttgaaaaaatacttgttttggctttcactgacactatgtaattggaaaaaaaaggtgatttaagaagaaaattgatttacacaaatgttttattaaggcctttgatttccatgcagaagggatattgatatattacttattttttaattgccaaatccttagtgaacattaaatgacacaaaaaaggattgtggcaaattggatctggaaacaagagttgttgctcttttaagaccaaaggttgactgagccataacttgccaaggtgtttggagcaaagtagatgtttattcaattatttaactcaataaataattatgtgctagttttgttcctggcatattgtgtacacatggctgtttgccatccaagagggtatatagtacatttgggagttattatcatgtaggtcgagttggaaatgtaaagcgaatgaacatgtcttgggagataatgtagaatgaagagaagacaccactgtctttggatgggcagaccagctcacaaagaagatggaggaaatgatggaaaatgacaacaggagaaagtgtggtcttatagaccaagggaagagggagttcacaaaggaagaaacagtcagaagcatcacatgccacagtgagggtcaagtgagagtcagttgctatattgctatatttgttgctttggaataaggagggctgagtaagctataatgagttatttgggctgaagatgccaaacttgaggtcagtggttggaaaaaggaataaaactctgtgtctcatctgagtggccaaatgtgcctttgccatggcagcacctcctgctccctcacctctctgttatgcagccaaaatataattaagtgtatgattgagatatgctcttttttccttctgagcacaggatttctcaaccatggcacagttgacattcgagacccaatatttctttgtggtagggtatgccctgtgcattgtaggaggtttagctgcatccctagtctttgggggccaggaccaccaaactactgccccaaagttgtgacatccaaaaatttcttccagcagtgccaaatgtcccctgggggtcaaaactgccccaggcaagagtcattgttctagatatgtagccagggagctcaagctgcttattttgaaatgctcatcaggatagaggtgcggaacaagcagattttagatggaaactgtctcagccagaaacctggctaagaaaaggtgcgtatggtgatgaaaaccaaataaccaagtaactcagaccttaattatttaagcaaagtttatctcccctgaagcaatgaaggaattgtctctagaaggtcaacacaagactgtaaaagtcaataataaaagattgctcctagtcacatacacacaccttcataaactaaacatgaggaagcaagattggctaatggtgatggcggtttgttgtgggcatgtggttagcaggaccctccacctctctgaccataacgccctttggtcttcagtagttgatgacaataccagctcagagtcatataatttgttctctacctcatctctgccttccacagagcaaaaattcaggtggtcctagttttaaaggtagagtaatattttccccctttctcccttttgttctccacttggtttgtttttctgctttctagaatctggaggacattcctggcccttagcagacttattttccccttttcttttgcttaatctaataaggcaatagcatgtacaaaccatccagcgagaattttcctctcctacagagtgtgcggctgtgactcaggatttggtgtgtggttcacttagccagtcaacaaacaatggctgcaactctgttagcactgtgctctcacaggtgagacaggtccatgctctagacaaaacagttggctgccatttttcatttgaacaagttttgttcaacttgggggtagagataataaacaagtcaaatgtaaatttgaaagacaaaataaatacaaattataatcattggcagaaaaaaagtgaagtcctgtgatgggtttgagattatcctagattattttagtgggtccaatctaaacacacaatcccgtaaaggtagagaatcatctttcccagctgaatcagagagatgagacagaagaagagattcaaagcgtgagagtaacttgccccgcccttcatggctttgaagatgaaggaaagacgctgtgagccacagaatgtgggtgacccctggacactgggaaattatctcagctggcagccattgaggaagtgagatctcagtcctacagcttccagaagatgattctcccactaacctgaatgagcaaggaaacggactttgctttagagccttcagaagggagcacggcactgccaatgccttggctttaacccagtgagactcatgccagacttataacacatttctgttgtttaagctgcaagtttatgccaatttgttacagcagcaacaggaaactaatacactgggcttggtggctgagtggatatggaggagggggaggaccacagggtggactcctagatcagccagagggcaatgagtccacataccaaggtgagaaaactcagggagaaatggactatggagggtggaaaccagactgacgttttggtcatattaaatttgaaatgtctataagacatttaagtggagatactagcaggcaattgactatgtaagtctagggttcagaagaggagactgagctagtgatgactttctggactagaagaatacagatccaaggcaggaggatcacttgagcccaggaattcaataccagcctgggcaacatggtgagaccccatctctaccaaaataataataataataatgagaagaagaagaagaagaagaggaagaggaagaagaaggaagaagaagaaggaagaagaagaagccgtgtatagtggtgtgcacttgtagtcctcgtaattaaataccagcctgggcaacatggtgagaccccatctctaccaaaataataataataataatgagaagaagaagaagaagaggaagaggaagaagaagaaagaaaaagaaggaagaagaagaagaagccgtgtatagtggtgtgcacttgtagtccccgttccttaagaggttgaggtgggaggatcgcttgagttcaggagtttgaggctgcagtgagctgtgatcgcaccactgcactcctgggtgacagagtgagattgtccctaaaaaagaaagaaagaagacaggtgacaacatgcaacatggaactgagtggatgtaagaagtgagtgtggctggagaagcaagactaagtccaaatcaaagacaccacagtatgtgaggttgggtgggaaaggaggaggacatggcaaaggtgtcagataaggacccccagtagggcaaggagaaaaccatgagagcacagcatcagaagggccaggagccaggcatgggctgcaacggaggatgtgggcagctgagaggactagtggaagaatgacagacaggtgccacgaatttggcaatgttgaatggatgctggtccttggtaagtctgcattagtagggtggcaaggatggaagccagatgggaataggatgcggaggcaggggtgaggcgattaaattcagacaacttgttcactagaaacagaagtggagagtggatctagaatgggtgagagtgaagagatggcttttaaagatggatcaaagaacaaagctggggtgtcacattacctttcaaatttattacaaagcggtagtaaccaaaacagtatggtgctggtgcaaaaacagacacatggaccagtggagcagaatagagaacccagatataaatccacccattgcaaccaactcatcttcaacaaaggcaccaagaacttacaatggggaaaagacagtctcttccataagtggtgctgggaaaactagatatccatatacaaaagaatgaaaatagccccctatctctcatcatacacagaaatcaaatcaaaatagattatagacttgaattttagatctgaaactatgaaactactagaagaaaacactggggaaccaccccgtgacattggtctgagcaaatatttcttgtgtaagttctcaaaagcacaggcaaccagagcaaaaatagacaattggaattacataatgctaaaaagcttctgcaccacacaggaaacaacaaactgaatagacaaaccacagatagagagaaaatctttgcaatctaactgacaagggactaataacctgaatatataaagaactcaaacaactaaatagcaaagaaacaaataatttcatttttaaaaatgggcaaaaaattgggacaaacatttttcaaaaagaagacatacaaatggcctacagttatattttttaaatgtttgacattgctaatcatcagataaatgcaaatcaaaaccataatgtagtatcatctcactcaagttgaaatggtttgtataaaaaagacaggcaacagcattaaggaaaaatagctaatgcatgctgggcttaatacctaggtgataggctgatagatgcagcataccaccatggcacacatttacctacgtaacaaacctgcataccctgcacatgtaccctggaactaaaaataaaaactgaaagaaaaaaaaatgaagataaaaaacaatatgcactattcaaaaaaaaaaaaaaggcaacgatggatgctggtgggaatgaagaaaggggaattctcatacgttgctggtgggaatgtaaattagtacagccactatgaagaagagtatggaggttccttaaaaaatagaaaatagaactttcttatgaccctgcaattccagtactggatatatatctataagacaggaaatcaatatattgaatagatatctacactctcatgtttatctcagcactattcacaatagccatagccaaaatatggaatcaacctaagtgtccacaacagatgaatggataaagaaaatgtggtatatatacacagtgtaacattattaggcccttaacaaaataaaacccctgtcatttgcagccacatggatggaactgggggccattatgttatgtgagataagccaggcacagaaagacaaatatcacatgttcttatctgtgggagctaaaaagtggatctcatgaagatagagaatagattggcggttaccagaggctgggcatgggaggagtacaaaggggtaaagtgggaaaaaatcattaaatgtctttaaactgtacacttaaaaatggtaaagatgggctgggcttggtggctcatgcctgtaatcccagcatattgggaggccaaggtcaggagttcgagaccagcctggccaatatgttgagaccccattctctactaaaaatacaaaaaattagctggacatggtggtcacgtgcctgtagtcccagctactcaggaggctgaggcaggggaatcacttgaacctgggaggcggaggttgcagtgagccaagatcgcaccactgcactcctgcctgggcgacagagtgatgagactctgtctcaaaaaaaaaaaaaaagaaaagaaaatgtaaagatggtaaattatatatgtatattttacctaaatttttaaaaaagatgagtcaagtttgtatactgatgtgaacgatctggtcggggaggataagtggacctggagagagagagagagagagagagaggaacagagagatagagagaaggggagagagagagaggagaaatgagaaagacagagagagatagaaagagagagagaaggaagagagagaagaggaatgagacagagagatagagagaagggagagagagaggaggaatgagagagagaaaggagagagagagaggaggaatgacagagacagagaagggagagcgagagagacagctaagggggaatgggggaatgaaaggacagaggagagacagaaataatatttggggagagaatatttggggagaatataggagatggaccccaaggcacacgcggaggaatcagcccatggcgttcactgtagtaggaagggaagctggggagatggatctgtagatttgtcagtgggaggcggatggaaaagaataaaaattcctggcagcacgccagctcggccttcccacattagtacggccgtaataacgacttgggagtaataatccaaaaattcggatgtggagagggagatgacactgcatcactttgatccaaatggcatttttatgatggctttaaatatgtttatgatgtttacaaggagaaagtctagaatgctgagcaaaaggatgcctttgggaaaggacattaacattttgctgacaacaataacccccatgcttgcctctctcctcccccaggccttgcactccttctagttcttttgttgttccacacctgcaaggttgaccagctgccccacatcaggggactcagctcttgaaggtgttatcccaggaatggtagtaggtctttctgagtcaaatcaatgtcctccaatttgacttccaagtgaacttgtaagcagagatactcattattcagctgatagtgttaacagagatggctcagattctagaattattcctgagacaggctaactggaccatctgcaatgattcatatcatgcgtggtcttcaggagtccacaaggagaaagaaaatatttaaacttttatgctagtaacttttatctcattcttttaaaactgtatgttgcagtatataaaagcattaatacaataatatatgcatacaatttatgtctgtatacaatcatacagtggtgtgatcaaaacctttatcctgaaggaagaatgtggtctcacaagcctacacacacacacacacacacacacacacacacactcacacacacgaccatgcatggcggttgtgagatagtaacgcaatggattttcattgacattcctattggtggttgtcctttcaagagtctctcctggtgggtttggatcgtaaagcacttgctgcagcttctgagctgtcacgtggtgctggcttctgaaggaaacgtttgcacctctgcataatgtttgagctaaaatgatgaccctacgatagtcatactatatattaattggcatatagaatgttatatatgcctgcagtgcacctttctgcagtgactaatgggcctagagaggtggcctctctgcaggagctgctcaaggcaggtgagcatggctatgttcctcaggaggacatcacctatttatagggccctgcattctttctggtcctcagcaaggccatttgtgaattgaggcaatcaatatcccacccacccgaaccccatgatttcttagtggaaatagccaatatccattctgagtttactcagtgccaggtgctactctgcattagtgctctaatgcagagaaacttatggtaaagataaggaaacagaagcccatgtggtcaggatttgctcatagctacggagtggcagaccgaaatttggtttcatctagtctgtctccaaagcccgcagtctgaaccatggtgatttttgcctcttgcactctcagctgcttgcagctgcaggcacaatgattccagatttacaaaggcccgcaagtttagacatccacatttacataatgacttaaggatttgcagatgtctgggaaaaattatcctgctcacttggattattgggactgtgtctcaactttccattttattttgcacgtgtgcacaatattttcaggtaatttctatgaaataatatcctgtcacatagttaaaggttataaacatggtgctttacctttgtttttgccttaatggccaaaggaaggaggttagcgagtgagcacatttgctccttttatctgcagtaggagcgttttgttggaagtatttccatgtagcagcatgaagccaaataagacatttacaaacagttttttttttaagttaagatatatgtttcatctcttgtttcacattgttgcactcaatatttgcaattgagttagcttaaagtaaagtgcatttattcgactagatggtttgctccagttgccccactgtgtttttttcttctatttgattgctgtcttggtactaagccagtacaaagacaggaatgaagatttacaaagttttcaaagattataatgggcccttgggtgtgatattttaaataggagctgactttaagtcaaaagctttcaaatcaaccagtaagtacttaacagaagtcctttcttcatgacaaggatgaaacacagagtggattacgcaaggtgaatctggtcagcccgggcctgaggtcacgtctgactcccagcaatggtgttttgcttggagacttctactgccctcttggcccctctgtttgacctggcatggtccatctgtagtcactctcataacatgtcatacattcctacacattctcattttctgtgctccttcaactttttttttttttttgagacagagtcttgctctgtcgcccaggctggaatgcagtggtatgatctcggctcactgcaatctccgcctcccgggttcaagcaattctcctgactcagcttcctgagtagctgggactacaggtgcatgccaccaagccgggctaattcttgtatttttagtagagatggggtttcaccattttggccagcctggtctcgaactcctgacctcgtgatccacccgccttggcctcccaaagtgctgggattacaggcgtgagccactgcacctggcctcaacttttattaaaaaacaaacaacaaaaaactgaggcagggccctgcctggtacccctgacagccttcggaagaagaaaacaggccttctctgtgggtcatgtctccagggtgtgcaggaccaaatactgctttattcataaaacaggtagctggaaagctgccccactgagactaaagggaatggggtaaatcatcctcccttcatttggctgtggcttctgacaatctagatagttgtttgcatacctgtgtgcacacctgttgtcattctgtttggacagatgactagcgtacaatacaggttcttcagaggatacgtaattaatcaaatcataacaacctcaataatataatctgaagaattaaaagcagggctctggtatttgttctacatagcattcatataaatgtccgattgctctttgcagcttacgcttggtagtcccaatcactctctagaaagggcttatgagcagctacctggaaggcctggattagggagtggtagcagatgtcatggttgagaggatctaggggaccaggcagataccccatcggacagtgggcatcctctaaactgtctctcactgacttcactatgaaccacagtaccataattttggtctttaccattttcaaaattttctgtttttcaaaccacaggttcaaactctatcgtagtttcagattagtagtccatgtttttcttatgactccacttatttaagaacttcagtgacatacatttatctccacgtagtgaggataaaaaagttgagaacaagaagctaatacgatcatcaagacacagtcacaggaagtaaaataggaaggaaggaaaaagaaaggtctaggtcttcagagacaagggagagatatggcaaggcagaagtccctaagagttcaatataaagacaggtaataccaccactcttaaggaaaatattcccagggattcaaagttgatcggttccatgtgtctaaaattcacttggacttgtaagagaaccccaactttaatggaagaagaaaacaggtaaaaatatcctcagctcagggttagtggcttttcttatctcaaataaagggaataactcattcatgttgctgggctttctttgtcctgttttaagaaatttcaagttgttggctacccaaaagctgcattctagacttcttcctcttgtcccactgggtagaagcatggcctgatattttccttcttcagtataataatttcattttaaggacagtcaggtcctctaaatgtgttattattttggttcaggctttaaaccgaataagccagccaaacattgataaaagcaatgtatctgagcttcccatatttactcggcacccagtgacatttggctcttatctactgagaatatgagagtgataacagtaggaaacttaagtcagagcctgcaggttcttatttaatatctatagacactaaaggatttgcatctggatttaaaaggaattactctgagaatatttaattccaatagttggaggaaattgctcctgtgatcagtacaatttgccacagttttaaacatgtgggtgacaatgactgactttcatatttctgtcctcggcagcgtgactgtacacaactgagtcgcagccactctcagaggggattgcagcctgcagctcacgtcttagagcttctgaatgcagcagagaaccaacttgctgagccactatcattattaacaaaacgttggggattttaaaagaatcctcagagagtcccagcaacatattcaatatggaatgataagggccaggcctttggagagttgaagaaaccattttcccagtaaacccttacatcaaatgtaccagtgacatctgattgcgctgtttcctctcttggaaatgctcttcccctcctcctcacctatagaaatttgattcacttgtcacaactgaactcgaatcctgcctcccccaccgagccaccctctctgaggtttccttccctgactccagttggaacgagtcctttcctacttaaggctattatgatatgaccctttgtccctaacacactgtacttccaaagcacacacgggtttacatgcccgtcctctactgcatgccagactgtcactcactgtccttagtgggggcgaggttctgcattagcaggaaccagaacagcaccttgcatgtccttaagcggccgggttttggggagctgaatctgttcatgcacacttggccttgtcctgttctcaaagctgctccacagacacggggctgtctcctctccgtggatgtccctggctggggcagcttcttttccatgcatcagcctgtagcacgatgtgcagtcttatgagcagtaagaataaatgtaatgtttcttacccagcaaccgcagaatgtgcacagctgcaagcagagtgtgtgcatgtgacagtgtatttgtgtaattgtatgtgtgtatgagagagagacactgtgcatatgtgtatcagatgtaactatctatgtcacgtaaccacatattagacttaaatgttactgtttcaagtttttaatattaaaaagtagattttgaggtcaggcgcggtgtctcacgcctgtaatcccagcactttgggaggccgaggcaggtggattgcctgaggtcaggagatcgagaacagctggccaacatgatgaaaccctgtctctactaaaaatacaaaaaaaattagtcggacatggtggtggatgtctgtagtcccagctactcgggaggctgaggcaagagaatcacttgaacccgggcagcggaggttggcagtaagctgaggtcgcacctctgcactccagcctgggtgacagggcgagactccatgtctataaaaagaaattgattttgattttccttttgtgcttgtcctctgatgtcaccttcctccccacaacacacactactgttgttaatttgttcagaccatgggttcctgactcacaattagaaagtggaagtgacagtagaaacacattgctttcactctgagcgcccatggtgggctgttccctattttcaggaggtagatgttcatgcgggaatactgctttgaggactacatgccttgagttcagaaaataagtttgatttaacgcgccccccgcccacccaccgccttttgttttgcagagaacgaagactcagtcatatcttaggatgtcttaggcctgaacctgaaaaaggcttccctgctttatgtcatcatcagtcaggatgctatctccctttatcttttgtcccgtgtgctgggaggacatggtccagggtgaaatgaaaaacaaagtgaaatgcataactttatttgcgtgtttctaatcatcctttaacagcaagaataatacactgtattataatagtcaaatttactctcttgagcttacttcatctggagaggtctactgactattttggtaactcttgtaagatttttcactagctcaagcagcatctctcaaagtgtcaactgttcacctttcactccagttcatgctgctttttctggctgtgctgctaggctgaatgcatcgctaacacccgcacaggggacacagcagattttagcagatgcctctgtggtttgcaatgggagggagcacttcccatgtgtcccaaatgaaaacaagcagaacttcaggtatgaatatatatgcaagtacatacaattagaagaatatgcagatgtacacatgcctcctgggcacctgttttcaggacagaaaaggaaagagtcagatcgtgtgtctctgcatgagctcaattgagaaaggggttccctcaccaaatattcaactcattgattgttgcaaattctgagctggatgctaatgaggaaatcaaacactggctccttcatcccagatttgtaaagcttattactgatagttttcagtctttccgtcttctaatttataacccaacttctaatgttcaagtcactctgctctgtgcaagaatctacccctccatggttgggagactttggcaaacccaatcagagatgaggacaaactgaatcagcaaaggaggtggtgctgaccaggttctgacccagcagcatgtcttgggaagaaactaagcccttcctcaatacctccccgccaagctggcactgctcattgactcagatcacaaatcctgggtaatctgggtggagcatgttgcccaacctcagtgacatttgctatttctatttttggaatagagcgaaaggatccaggagatcaattcggcttgatcctgttttttcctttctagtcaacctcctacagtgtgagcaatgaccctcactccacccccaggcatacacacccccctctacatcccacaacttaggcagtttctaagactttgggaaaatccctgggagttcctcataacacaaaatgccttgggctgtacaagcctaggagaagatgccaagctgtggtctaggctcagggaatagtttcgctgccccttcctccccacctccctacagacaccccccaccagccaagcagcctgttcccactgatgcctgactggggaaggagactgagtttgttagggccaaggccataagcacttatcactcagcaaccacaaaagcaactgggttttgtgttgatccctctaagattaggccttgaacctcctttgtgcaccccttcccaacagacaattgtacttctgtctgaaagttttaattaaatgactcctgcacaagctgtctgatttcaggagacatagcagcatctattggatcaacagttccattgtttgaaacatgaggactataaataggaggcagaaactgacagcacatttagtgtgtttgcctatgtggtaatggacatgaatagtatgggcactgagctggtgaacaacagaatctcaaaaagggaagaacacatttgcccaaaacattaatcagtatcaggctggcaggagagaatcaaagtagcttctgtggagagaagacacctcacccagagataaatagcttgcaagtattagaacattcacagtgaaaattaacccatttcctttaaaaaaaaaaaaaacttttaattttgagatacttttagacttacagtaaagttgcaaaaatagtacagagttccgtatccccctaatccagcttatcctaatgttagcatctaacaaaaccatacaaccaagatgacgactaagaaattaacattgatacaatgctactaactaaactgcagactttattcagttttctccagtgtttctgccacggtcctttttctgatccagagccaatccaggatatcaccctgtatttaattgtcacatctacttggtttggtccacatttttattactggttgtattttctgcacttttttgttctttgagacagagttttgccccttttgcccaggctggagtgcaacggtgcgatctcagctcactgcaagctctgcctcccaggttcaagcgattctcctgcctcagcctcccaagtagctgggattacaggtgtgcaccaccacgcccaggtaattctgtatttttagtagatatggggttttgccatgtgggccaggctggtcttgaactcctgacctcaggtgatccgcccttctcggcctcccaaactcctgggattacaggcgtgagccatcctgcctggccattttctgcattctttctacacttattaattgctgtttctctagaaggaagtgttattccttctcccccatttatttattggttttttccaaggagacatgacaattaaaaacagggtgatatcctggattggatctgtgacagctccttggtgttccctttactttcatgaccttcttacttttaaagagcattggtcggttatttcatagaacgtccttcagttttggtgtgtcttatgttttctcacgatgagattgagcttgtacattttggggttgaataacagaggtgatgggcccttctcagggcatcaggtcagagagtacgtgatgactatctgttttactattggtggtgttaacctcaatttttaggctaaggtggatggagttaacctcgattactaggctagggtggtgtgtgcctgtcaaaattatccactggaaagttcctatttttctttttgtgattaatagacatttatgttgaagggggtcctttgaggctataaaaataacttctttttttttaaattttgctcactaattttggtatccatgtgtagatcttgactggagaaatttttgttactggttgtattttccacattctttctacatttattaattgcaatttctctagaaggaagtgttattccttctcccccatctatttatttattcagttacttatttatatcagtatgaactcagcattatttattttattctttggataagaatgcaataatgcaatactataacaatttattttcctgatcaaattgtttcagctttggccgctgggagctcttacaggctggctcgtgccccctattgcaagcttctatttcttttgtttgactgcttctttactctctggtaccacaaatcctctatgctcgtcttatatattctttgctccagctttggaattaaccaatacttcaaaagtcctgtttccttttattgcaaagtcaaatttagaaccaagatctgggcaatagatgtgctcattgctactagaatgtcatttccactaggtcatctcagcagacagaactaggaaatgcatgtcatatgtaccaacccatatgtatatatgtatctatgtttatttctgcatatatttatctgtttatatattttaagtaaacacaagtttgtattgatactttggactccaattcagcaccacatggttcactctagccttcttccttatttgtaatgcctttccctgactgtgagagcctgactcacagcatctaccatacatttcttgttttgctaactcataacccagagacaaacaaatttaccaaataaaatacagcatggagtatagttcttgttgtctttagccttccagtatcgagtcaaaacagggtttccaaagatacctaggtcagctcttttgtcccccacctgtctcagtgagccttggtgattgattaatttctgacacagttgggtttctttcttactgtctgtgtttcttctcaactgcccccccttccattcagccaacatgctggttgattttaaaaatttaacttacatataacaaaattgtaattctgtacatcaaatttgtatgtcactctttgtgacatatagttttatgcattttgacaaagtgatagtcatctatttactgctatagtttcttagagcacaattccattcccactcccctaatttcctcatgatccctgcttgtagtttgtcctccccaccatcactcaactcatggcaaccactgatctgttttccatcttataaagatggaagctgtaagcttcacctcttccagaatgttgtataaatagaatcaaacaatatgcagcctttgggatgaacttctttcacatactgaaaagaatttaagattaatccatgttgttgtttaaattaacaatttgtttctatttattcctcagtagtattccatgatacaggtgtaccatagtttatccatccttgtttgaaggtcacatgggttgtgtccagcttttggccactatgaataaagattctatatagatccacatacaggtctttatgtgaacatatattttccttttcttgggtaaataactaggattgggattgctgagtcatatggtaggtgcaagttgaacactataagaaaatgctcaactgtttatcaatgtggttggccatttttgctttgagcgaatagcaacatatgagagttccatttgctctgcctccttgctggcatatagtattatcaagatttatggggcttagccattctaataggcaggcagtggtattaccttgtggtgttatttacatttcccaaatgactgatgatgttaatcatttttcatatgcttatgcaccatctttatttacatgcctgtttagattacttgcctatttaaaaaatattgggttgttcattttcttatttttgagttttgagagttctttattgtattctggacacatgtcctttgttagaaatgtgatttgcaaatatcttctcccagtttgtggattgtctttctaattttttaagcgtgtccttttcagagaaaacatttttaacttttataaagtccaactctttctttcttccttttctttccttttttttctttttcttttccttgagatagagtctcactctgtcacccaggctggagtgcaatggtatgatcttggctcactacaatctctacctcctgggttcaagcaattctcctaccttagtctcctgagtagctgggattacaggcacccaccaccatgcccagctaatttttgtacttttagtagacacggggtttcaccatgttggccagtccggtcttgaactcctgaccttaagtggtctgcctgcctcagcctcccaaagtgctgggattacaggcatgagccactgtgcctggccattattttttcttttataaattgtgctttggtattatatttaaatactttttgtctaaccaaaggtcattacaatttgcttccatgttctcttctataagttttatagttctacaatttaaataagtctattatcaactttgagttactttttttgtataaaatatgaagcatagtttaatattctttttaaaaatataaatgaaatattcacatgaatatgaaattttttcataattccagcaccatttgttgaaaatactattctctctacattgaattaattttgtacctttgtccaaaattaattggctattcttacgtggatctatttctgggttctcatttctgtttcattgatatgtatgtctggccttttaaaaatattatattatcttaattattgtagagtcatcataagtcttgaaatttggtgctatgagtcttccaacatttttcttctttttcaaaattgttttggttattctagatactgtgcttttccatatatatttagaatgagtttttcagtagctaccaaaaaagctttcttggattttgattgggattgcattgaacctatagatcaaattaaggagaactgacatcttaacaatattaagtattctaattttgaccatggcatatctttccatttagttagatcttgtttgatttatcagaatttttatagttgtcagcatgcagattctacacactaaacaaaaaaaaagatttatacctaagtatttcactttaggagccactgtaaatttattttaaaaaaattggtttccagtggttcgtttctagtgtatataaattaatatttgtatgttgaccttgtgtcctgtgacttggatcaacttgcttaccaaatctagaagctttcttttattccctagtttcttttttagatttttgtatgtagagaataatatctgtagagaataatatctataactagagacagttttatttcttcttttctagtctgtatgcttttttttttttttctgccatattgcacagactaggaacccagaacaatgctggataccaggagtgagagaacctccttgacttgttgaagatcttaggggaaaagatggaaagtctttcactaataggtataattataattaattatttcaatatcctttattggttaaaggcaggttcctaggtgatcacaagttttttttttcacgaatagatcttgacttttgtcaaatgctttttctgttatctattgaatatatacatttttttttcctttttagtctgttaatatgttaattacactggctgctttttgaatgttaaatcagtctggtagtttttggaataaactccacttggacatgatgtattatatttttaatatatcgtttgctgaaaaaaaatattggtagaatgcatttattgttggcagtaaagacctccatgttctttaaaagccaaagaccagggccagagtactgctggaagctaatctcctccctgggagccacacagataaggttaactggaagcaaagggctctggaagagaggaagccagggtgccgctgctgcgccccgttcctgcctggcttggacgtatctggaactgacctcattctttcactatggtggacagaattctaaagctgtctttctaagatgtcgtcccctggttatataatcaagcgctaatccaggtaatgctgtgaagggactttgcaacccaaattaaggaggctaatcacctgacctgaaaatatggcaattatcttgggttactgagtaggtccaatgtaatcacattagctcttaaaagcagaagaggaagccagagagatgcagcagaagggctggtgggactggaaacatgagaactttgtctgccattgctagttttgaagatgaagatggaggaagggaccaccgaggaatgtgggtgggctttagaagccgagaacgatgcccgcaaggaagcaagcaagggaatgcacccggaacgactttggaagcagatttattccccaaacctccaggaaggaacacagccccactaataccttgattttggcctatgagacccagagcagagaacaagctgaaccccactatgtgtggacttctaacctacaaaactgtgagataatagatagacactgttttaagatgctaaatttgtggcaatttgttaaggcagcaataaaaaacgaatgctttggcttagcaaacatatacggaagaccttctatgtgtcagggactgccaggtgctgaagataaggagactgggaagaaaaacgacctctttatctaaggggcgcaccaaccagagggagactataacaccaaacaaaacatggaggtattccgtatatgtgccgtaaaagcaaagcttatcttggttgcaaagaataaaaagcaattctggctaactttaaataacaaaagaaaaaaaaagagagactatgtgcttttaattttgagagcaaagatactggaagattctagtttgaatcttctagtttgaaggaaacttcaaacatgtcagatttggggaaaggacgaccagtacattcccaggaaccttagtcatagaagtttgtagactttctgctggttctttaactctgaacccacagttcttggccttaatttatcctttccaaatttaaaattataagagggaaaaagacaaggcttagattggtcctcttcaaggacggcatcaatctattcatgaaggatccaaccctccccagcccaaacacctcccattaggccccaccttaaagactagtaatcaaatttcgacatgaggtttagaggggataaatatccaaactatagcaagggtaacctgttttacttagagtccattaaaaaaacatcttcacagcaacatgcagcctggtgtttgatcaaatttctgggtaatgtggactaggcaagttgacccataaaattgaacatcacatcttgtggtacacataacccatggggtctagctctatgggtcagagcctcatccccagaaagaagcctctttatgggccttaaagttagtcaaacaggtgctcccaagactgtccagttgtcagccacacttcaattacccctacaatgaggatggtaatactcataggattttttttgtgtagcttggaaaaagattatgaggataaaatgattttgttaactgttaagtgatgtgcgtatgtgaagttggcattatgtattttaaattaagattcaaggaaagttggcaaactttgaaatctagaatttgtacttgctactaaaaacgagtaatttttaagtgagacgtcaggaaaccccaaagccttttcgtgattccaaatgctgtcagaaactcctcaaagcaaaactccaccatctgcactttaaattgaaaagtgtggcgagtcctcagggatctagaactagaaataccatttgacccagccatcccattactgggtatatacccaaaggactataaatcatgctgctataaagacacatgcacacatatgtttattgcggcactattcacaatagcaaagacttggaaccaacccaaatgtccaacaatgatagactggattaagaaaatgtggcacatataccccatggaatactatgcagccataaaaaatgatgagttcatgtcctttgtagtgacatggatgaaattggaaatcatccttctcagtaaactatcgcaagaacaaaaaaccaaacaccacatattctcactcataggtgggaattgaacaatgagaacacatggacacaggaaggggaacatcacactctgggggctgttgtggggtcaggggagaggggagggatagcattaggagatacaccaaatgttaaatgatgagttaatgggtgcagcacaccagcatggcacatgtatacatatgtaactaacctgcacattgtgcacatgtaccctaaaacttaaagcataataaaataaaataaaataaaaagtcatgaagatattaaaaattttttttaataaaagcacgatccatataaggaaaaaaaaaaaaaaaagaaaagtgaaactgcgatcatccctgtctatcaggaacagccaggggctgatgaattgcaacaggatagggttgtcccaaccccaaatgacaaagactcactgccctgaaggataaaagtgggaaaaaacctaaacaaaaatcacgagttgagccagagatgtttgtgacccaacagaacatggatttttcacgttctcttgtgcttttctggtctttactggatgaaacatcagagcatctatgctgattgtattctgacaaaactatcagaggccagagtgagtcttacaaattttgtgtatcttattgcttcacagtcagtcccttctttatagcatggctgagtgctgaacttagccccaactttttaaaaattaaaattggtcaatattgcaaccctttcctagcccttctgtcttctgtccctccctcccttctatccttcttgcagatgtaattcaggcagaattctgacattcatgtatcaaacttgctgttgccggcatcattttgcttagtgttcattatcatttctgaacggttctatcaggcaaaggcgtcctcgttctccaagcaaggaagccccagccagacagttgtcaaggcaacggaaaatgcacactgtgaactaccaagaaaaggccgtttctggctgctaagagtttttgcactcttgaggctcaaacttaatttctgggcttggcaaaaagaagtattttatggctaattataaaatgtacccaatgttattagactaggggatagatgattgcctgctaaatgtgttgtgaaaaattaaagcagttttcagagcggagggagctaaactcagtgtgcccaaaggatcgatcgcttatttttgtcattctttatagctggaatacaacagttgatttgagtctcattatctattttgttgtcttaggtgttcaaaacaaggtagaaagtgcaccgtccatatttagactttttttggttggcgggggtgatggttagggcagcgtttaaataacatgtttcttggtccacattaagagccgtacattacacttagcaggtgagactataagatcagagtctgtgggctaatttcgtacattagctgctatcattgtcttccacatctatttatttatttatttttgtcttctattctcttcccatgtacttgcttgtcaacaaaccccaaataaatgccacatattaagttaataaaagacatggtagttagggattgaaagtgtcagggtgaaaacactggtatgacaatccgccttcttaataaggttgttcttttgtaaacaatgttttaaaatctaactttatatgaatggttgattcaaagcctggtggccagtgttacagtgaatctccattcaccgtaatggagattcactgtaatggactcagttaatccagtcgttgaataatccatgttaagccttcactttttttctttttgggtgagcctccactcattgaaaacaaggtaaacttagactgaggttgacatgattgggtatctttcctcaggatctcccccttaagaaaggaaaactgaaccatcctttagaagaggaaatatgatttacctgaggaagaggtaatatatttctttctacactcagctgattgatcatggaataaaacagtatttgtagtcctctctcaggtagagaaggctcatgaagttgatctcctaaaagaaaacaatgctatggaaactaagtatgttttaatgtttaatgtgcatcgtatttactcataggtattcaaacaacatccctccctttagcctgaaatgttcccaggattgtattttatacactaggcacattgatataggcaaaggaatggggaaggtaattatccagcaatcagacatgtcaaccaggcttgtttggataactgacagcggtgaatcaggttcatcgcctctattgctttgtgggactttgtttctctttatagcatttccacatgtgttgaaacagggcctaaatgtaggtgttcaggatattaaaactagagctttctaaaaggactgagtataattaactcttgacttaagttccttctttaaatttcatttctatctgtggtttagaggcagtgggaggctgtgaaatggaaaaatggaccaaaataagaaactgaagtgaaatgaaatgactgaaatctgtttccccatagccagctttctggagcgtttcagcagcgccagtcatccttgcatacactgagtttctactacattccaggtgttgtaaaattttctttgagtggggtagaaagtaggagaataaaaatcaaagtgacgcctggtccagctctcaaaaacctcagattctaatcaaatgcagattcggtctgaatgtgcatcatcagaatgtaccaagggcccctatcaacgtgtatacagtttccacaggaacacagaggagagagcagctatctctgcctggaggagttgggaaggttccactgaagaggtggatcttgaagaatgggtatgagttcaacatatagagaaatgggatatgagactgaaagagcattcccaacaatgcacatgtggctgagaggaagagctcgatgcatacgagcagtagagagttttttcacaaggcaggggactcaggccacttgtatggatggaaaggaagggacttaagaaaggtttttaaggcaggaagagctggctgtctccccgagacgcttctgataagctgtgctaaagagcttggcatttagctcctgggttacagggcctctgaaaggttttaagcaaatgactaccctgaagagactctggtgggtggaaagacaaagcatggattggagtgagaattaaaggtggagacaggctcagggattaagggatggttcaagggagatacacggacctgaacaaaggtagggggcatggggatggagatgaaaggaaaccatcagaaaagaaggggccaaagagggaggttatcttggcagaagaaagacattattcatcttggttggttggaaatgtgggtctggagctcataagacagatcatggatagggatatagctcagggtctggggtcctgactccccctaagggtcttacctcagagagtgatgactgagcttctggaggtcttgaatttcctgaaatttatgtaaaatggaaggtgcatgtgtatacatttcctagggaataagtcaatagccttcatcagtttctcaaatggttggaaaatggaatatagaacagcaccaaaaaacactatcttaaatgaggatctatctacagggtgttaaacggaagtgagagtaacccagtgagcaatggagaggagagaaggtcccggcagccttgaggccccttcccccttaagctgagcactcagtgtcactcttctcagctccatctgactgtccccatctctaatctctccccatatgtacttcatatgaatcaaaggaaataacatagagagcttgtaaactctgaaatgctctgcaagtgtttagttatcatttaaaagatgaaatgaaatatggcaactccatttaagcttttattagttctgcccatctccatggaaaatatctgtgacattcaaaatgcctgttgatgctacattcactaatctttttattaataagtgagcatgtaaagttcacacacctcagacactaagatatgctatcagtacacatcgatgccttcctcctaattcagggctgggtaggatgggcctgagacaacacagatggatggccaatgactcagaggtggaaagtggaatgcaacccagcagtactgtgcagcgatgcagtcagatagaaacaacatctaacttttcagtgcagcttaaatgatgttgaattagccatggtgtggcggcacgattatgtctcaacatcactgtgctaaatctaaaccagaaggaagccctgtgtgcagagagcgatggtagcaaaaagctctattaagatttgtttcagaacagaaaagagtcaatatatactataaattaaaaaaaaaattgtcaccattgtagccgatgtgagaaattttggcatgctatttatagcccagattcccatttgaagtaaaatgcagtcagattgcaagaacagggttttgagccatagaattgatcatagagctgatggagccacatatcaagaattgttgatgggagtgggttctctgcatttagacttctgagatgagggataaggaagaaccctctaatccaggtgtctaaaatagccatgggtcatttaagaaaattatccaccaaagattccttaacaaatttttttctaaaggcgggtttaggcacatggtaggaaggaaaatcaaaaagaatccctttcttaaatgagttattaaagaaatagatttgattagaaatgaactcatgaaattaaaatgttaggatgattgaaagtagaacatcacttttttcttgtgaaggtcaaatgaggggtgtgcttgtgagaaaggaaaaagacaacagcaaggaaagcaaattaaaaccaacatcaggttgtgcaatggactaaatgtgttcccttaaaattcatatattggaatcttaacaccaatgtgatgggaataggaggtggggcctttaggaagagattaggtcatgagagggggccctcataaattagattagtgcctttttaaaagggacccccgagagctctctctcaccctgtctccccactgtgaggacacaaatagaaggcagctgtctgcaaacttggaagggagtcctcaccagaacccaaccctgctggctccctgatcttggacacatgcctgttgtttataagccaccatctctatgacactttgctatggcagcctgacctgactaaggcaagctgggagttagaactctcaaattctccgaatctcagccctgacattcaatagctgtgggtggcatgatgggcatggcactttacagatttgtttcctgacttttaatctaaacaagaaagagcacaaccactactgcctacctgagatcattgcacacaagtgttttataaactgttatataaataatttattttggcacaatcttgaaattttaaatgtctatatgaaaattttctctgcttgtcaccactacctcctgtccttatagaaacgtattttcatgagccatttggttcagagtttaaaagcagggagaataattattcaaccataattgatgtcaagcaatgttgtaaaatctcttaacttatcagagtctaagcactgttggttatgaaacccaaataataacaatgcatgtgaaagtgttttgtaaactttaatgctcaatgcaaatgtcatttatttatttcagtttctctcttactaaagtctgtttttctgatctttttgctgctggtatatttttgccctagtaagttcaaaaaaattaaaaagtcgtaattcttggcttcagatacctccctaggaattctgagagttttttttctatatagatctgcattgcctgcttgattccagcacatctcaactgggtagctcctacgccaaccatttatttcatgagcttgcatctcactctcttctcaccttctccattaacctttaccttggaaacgtcagatctgctcccatctaagccaaaaacactatccaattttatatccattaggtaatgccttgtgattcaaactacatctcaagattctccttgttgagaaagcttatctcaatgtgcttggaggggtgacaaggatgcaattcgttaatcattgtaactcttcatatttagagaatgcagcaattaaaaggtgcttcctcataaacatgtgaccttgtttgatcttcacttctataaagaaaaacatagtacctataattatttaacattattccatccattgtgcaaagtgagaaaaccaacaatgtttaaatccaataaagtccaaaatctctcagatgataagtaaaacagtgaagtttgcattttttctgtctacatctaagttttttttctttcaggattttttctttgtttttggttttctgaagtttgaatatgatatgcctacatgtgtattttgtttgtttgtcacttatcctgtttggtgtactctgtggcttggtgttttgcattacttttggaaagttctcagtcattgtttctttacatatttcttctgctccatcctatgtttcttctcctactagtattctaattacatatatattgcatcttttgaaattgtcccacagttcttaattgttctgttctgcttttatcattcttttttctctttgaatttcagtttggaaagttttcattgatctatcttcaagctcactgattctttctttggctgtgtctaatccactaatgagcctatcagaggcattcttcatttctgttagtgtttttcatttctagcatttccttttgatacttttctagagtttccatctctctacttcattatccacctgttctttcatgtctattttttccattaattaccttaatatattaatcagttactttaaattccataataattacaacatatgtttcatatctgagtctagttcttaatattgttttgtctcttcagaatgtttttttcttgtcatttgacatgtcttataattttttgttgaaagtcagatacaatgtatcgagtactaggaagtgaagtaaataggcatttagtataagaattaatggtcgtctggcagagaagttcgtttgtctttagtgtttgctatagttgtatgttacaaatataaatatagccagaggtttcagatttctctagtgtctttttctttgtctcatctcttacctttgggcttccctaagtactccttcttagagagagtttgtgtcacctctttcagctgtgctgtattcccgctgatgtgatggtaaggtgcaggggaggagaagcattctctaattttattaataaatctcagtcttttaatggggctgtgtcttggggctataaccgttacaagctttctcctttggtaccgtcccttccccctgcctcctactccctttcctgtctgcagcctccccaacccatttcctggaagccatggtccttgttgactatggggatcttttgccccctataaagtagacagaaagtttggggggtgctttccactggaatatgactctggcaaagtattttctcttggagcataggcctttgttgcagacacatttcacaaagattactctcccccttctcttgccaaaaccttgaagagatcttgcagatcttcatcttgagaacctgtgaatttcctaaaggtaaagccaatgatggtatggggtccctgaggactggggacccctggaagtttctgactctcatgctagtctacactcctggtttatcaaaatttccatttgagtgttcctatgagtttatgcctcatgtggcttctgctccaggtgagcagatcttggctatatttccccagatttgggggtggcagtttgccctaaagccacaattctctcgtggttccaagaaatataattgattttccaagaaaaagtccagcttttttgttgtaagaataaaattatgatttccaaagtatttacatgtcagaacaggagccagatgtcccaagtcatttcctttacctgagagccttcaccagcttctaagcaagaaaaagaaaaatctataaataagccaccatctacttgttgctattagtaaaaccatttttgtgttattagtaaagaggaaggaaatgctgatgtattgacttctctatctgcccattctctatggaggaggaaagccagcagaaaagtgctgaaatatctttgaggcataaaaagctaagacataccatgatgcaggagtctagcaatctgtccagcagaaggctcagtctgactgtggccatcaggggtgtcttaggagggatccaggcctccacagattagaacaacctccagatatttcccacttctggctagttattgatatgctgtccacaaaatcatggcaactcataaaatcacaaaaatttgcatgttggaactggaagattctcagggcttttttctttttctttctttcttttttttttttttttaacaaatgaggaaactaagtcccagagagtctggttcaaagccatacagttagctcttgacagattgtggggtgggtggcgggggagtgggggcagtctacacttttatcaatgccttttgctttcactctaaattacttttattttcattttattctaccctttggagcataagatttctatgtacttgtatatatacttttctcattagtatgttggctccctaaggagggtataaactggccctttatgttattactaaattcccctaggcatttataacgatgaaaaatgtcaaaaaaaaagaaaaagaaaaagaaaaatatagcagtgctgaagatggggaaaaaaaggtaggctacacttatttatttcccttccaccttgtcatctaggcattttgcaagcatatcacaacagtatacatctgatatatctgctgtcacctccatcacccttccattccacctgagatcgtgttaggaaaagaaatgaggaagacgtttgtgttcttcttgctcattgtttcaaatgatgagaaagactttgatgagacagacagaaagaagaatgaggcaaagcaagaataataaacccaagtgcaatgataaaaccaagtgtgcagtgggaaaatatgcaagactaaatctaaatccttcaatgtgagtcatctgaggatacctttgaaaatggtatttttatttggtttgtctgaaacattatgtagcttttgtcctgtgcttggttatctcagagtcttagctgtcagagaaggaagggacctgagagcctgctttgtttaaagttcctcgtgctgcactggaatccattcaatcaccagggaccagctgacttctgctgaacccaaccccatccacacccacccccagtcctcaacccacttactttacattccaggggtttgggtgttagaaagtcctttctcttgtagaactgaatatgatttccttgtaaatccatgaattggtcttaattacatcataaaataaatatgcttgacaattcagctattaagcaaagtatacattttgtattacttagatgaagtctttctgaggagaaatcttggacaaaacttgacagtctattcttttattttcatggatctccaaacaatatgaaccaaaatggctagcctgagtgatttaaggggttcagcaaattgacctataaaaaaaacggaggccaaagtagtttgaaatataggacatagaaatgtctttacttctccccaagtagtgaatgatcacaggtccctgtggggtactcagggcaggaatatgcccccaatttgtggagatgaaggatcactttctcatctagagtggtaaattatattaattggagaaagtggtgaattatattaaaagaggcatttccagttccaactcttcagatacacatggaaatgggcagttgtgagtatatttagagacaccatgttgcactagacgttagagaacgcgagtgtcacgttaaatggtgataggtgagactgaaattagttatctgaacattctctttttcagaaagatactggaccttgcattagaaaaacctggaaaaagttacaaggtatggagacattattgatgtcaaacatgatttcagacaggctgtttgttctaacctcagccaaactccggccccaccggggaggcagcaagcagatagcaggaggaatgtggaagagagaaaggcttacggaaaatggaccaaagaggaaacaaggcagaagttctccatctcttttgattggggccaactatgagaagagatagccccagtgagaaaaagtgagctctaagctccagggatcagcagggagccatgaggggaaagttttagtacctgagctctgtgtatatacaagaaaatgcaaatacaaattgagcaccaagaaattacacatctatacgcagaagggataagaaaaaaaggcaaatttacaatgtgacatcactaattaaaagaattagggaggggcaagagggatcctactgtagtagatcccagactttttgagtttattaatttttaaaactagaatgttgagttcatttgtttaaaatattaaatgtaattcaaataatggtatcttagtgattattcaaaatcaaaattttatttgtcaaaaagaatgctgaaaaaggtcatattcaaaggaaataatgattatatgactaaagatagtaattaatttctcaggaaaaaaatgatccacccacacataaaatccttcatctttgtagaaacttatttgaggtaaccctattttgctcccttaagctcacctttgattgaacaaagtaaaaatagtctttctttgtctatgcatttactttaataaataggcatctagaaacatcagaggcaataatatatcaaaagctaactgaattccaccaagctgttttgaaaatgggatttctccatcttcgaattttcaaaagcaatttatctcctccacaggctgacaaaaaaggaaagtttttgatgccttactctgagggaaaatttcttgatttcaaatatgtaaggaaaagagttctctgcatattttatcttattgtatatatatatacatctatcactttgtttctttgtcaacctcatagccagaattactgactgatgatcatttgatgtaccacactaatttcagtgagagttgtactgagtgttttatctcataaatatgtttataatctctaataaactaggtatgcaatttcttagtgaattttcaatggtaatgcaaagctaaatatcaattaattaaagagttctgggggtggaaaaggggacaagggaaaggaaccactcttggttcttacaagatggaatttgcaagagaacttaaattacaaaggaaaaatggcattaaattaatatctaatttctaagctagttgaccaaattatttgaggcttattggcgttctcttgcttagtattgatatagtacttacttaacttgctatcaccataaacaaaaacaaacaatgatgacatgctcttcaaactgaaaagctgcaggtagcattccccaccttcaatagtagctgcctgaatctgtgtctctccatataacctttgaaatcaaaccgttcaatgaggatattaagaaatatcacccctaaccctcatgtacaacaaaactggaagacaaagaatagtttagactctaagtgtaatgggaagaacctctcaaaccagcagaatcagtttcagactcctgactaaagtctctctgatggacaaggatggaagaggtgtgactgcatttgaggatgtagcagggaggaaaagaaaaagcacccccccaagaagaataggggtggatctcaggagtgtactgagatgggacatagagaacagggacatgaggcctcagggatccactggctactgtggaattgaaagaaagaggcttgatgtttcaaaggaccataggtgtaagtcttctagtaaagaagcaggcaatgtggaggcttgctggtaaaggggaaaagatagcaaaagctagaagttataggaagaagtgttatacatcaggaagcactgtggccacctccacacggtagaagaaagcaacgaaaaaatataccccacttacaagggcaacaaaaaaatataaaatacttaaaataaatgttgtggccaggtgcggtggctcatgcctgtaatcctagcactttgggaggccaaggtgggcggatcacgaagtcaggagattgagaccagcctagccaatatggtgacatcctgtctctactaataataaaaatattagtcaggcatggtggtgcaagcttgtaatcccagctaatcgggaggctgaggcagaagaatcgcttgaccccaagaggtgaagttccggtgagccgagatcgcgccagtgtgctcagtctgggcgacagagcaagactctgtctttaaaaaaaaaaaaagttgcaagaaatgtggaaaaaaaactcatgaataagccttgaaaactctcctggaagacccatgatcaacttgaaccataaggaaaatgccccttgttcatggacagaacaagtcaacattataaacttgccaattttcccaaaaagaatgaataaacaatacaatcacaatgaaaatagcaagaagtttgttttttccccctcgagctagacattcgattctaaaattcacatgaaatataaagatgggataatagctaagaaactcctgaaaaggaagataaactgggtggggggcagccctaaccctatcaggtattaaaatatagcattgagctgctgcatttaaacgattctggaaatgttccatgaatagacagaccaatgaaacagaatagaaagtagatccaagtatataaaaaatttgtgtttgataaaggatgaatgcatcctttgttatacacagactttcatttgggaatgtataaatttgggggaataatgagctttcattaattactgtagaaattatgaactttcattatttattggggaaattatgaactttcttgtaaataatgttgaaacaattggtttcatttgtaagagaaaaacgtggacccatacttcacattatacttaagaggaaattctaaaagatctaatatataaatgtaaaattgaaaccacatagtactcagatgaaacaaaactttgaagggaagaaaatactcaaaatccagagacaataaaaataaaagaaagaattaataaattatattctctgtgtgtgtgtgtctgtatgttttaatataacaaatagaacaggaaaaataatcaaagctaaaataaaagaacatgttttcacctgaagaatttaaatctgtgaatcaaaatacttcatctattatcagttgactaaaaccatagacctggacacagttttgtaaaatttataaaagctcactccccaagtatttcagcagaaaagtcaatctacctacaatttaataaaaataatatttgtctcagacttttccatagcaatgaacatcagatataaataaaagtaacatttacagagatttaaaaaagaaagattgtaacccaagaatataaactaaacaaattttcactcatctgtaaaggtcaaagtaaatagtcaagtctttaggaagtagttcacttccatgccattttggagaaaaataaaaaaataataattgaatatgtagtacatcagagcaaagtaaaaaacttggtaatatgaaaattgtggtaaataaagaacattcaggttcatttttaaaagttgcaattattgaaaatactcttgaaaccatagggtaaatattttgaaaatgctcctgaaaaagaagagtctccagtctttccctctgtctctcacaacacacagccacaaacacacttacgcacttttaaaatattagattattacaaccaaagttaaaaattagctggagaagaaggccaaggaataaaaagcagccagtttcctaattttctataaagaagcatcaatagaaactgttttatgttggcaatactaattagataaatattggttcaagtgcatgttctcagatttgaagaaacttatcagataattaaaaacaaaatatacctctttctagttattagaagtacaaagacattaaaaataatcaacttacaaaaagcggaaacaagaaaataaaagcacacaagcaggaaaataaaggtatgaaatgctaactccctaaagtctattattttctcatctataaaatgtgggttataacaaacctaaccataggttaattttgaagattaataagataatgttcaaaaagtatttctcagtgtctggctcacaatcgaagctcaaataatgtttattattactatttataataaaatatgacagttatcaattatgaaagtaaattttcatagttaaaatttaaataaaatattaaacctttcttattaaagggaaaaattaatacaataaataaaataacaaagagaattaaaaatttaggcttgtgaaaaggtatctcaaacaacacaaatcaaaagaaagtaacagtgtagaattccaagtaaaaaagcattagatgatgcaaagatggtcattttatatggatacatttttaaaaatcacagtgatgataaaattgtcataaaatttaattaattaaacatttatctttacaataaataaaagtatttggaaatacaagggataagaaataatttttaatgctttgctctcagtatttataaatcaagaagaccaaaaatagggcaaccctcttttgggccccctgtccgtggtggagagctttcttcaattgttcattaaactcttgctccaacctcaaaaaaaaaaaaaaaaaaaaagaagaagaagaagaaataatataaatcaagatgaccaaaaatatacctaagatggtagaggactttaataatgtaattaattagatttaattagtgtatattaaacaatatacctttccaaggttttggaaaaccttaacaaaaactatatcttatgtagtctacaggatttaaaaaaattttatttgtatatgacacactctatcatgactatgtaataaaaataaaaactaatgggaataaaacatttcaaaaaatccagtaattttagaataaaaagaaaacattgtaaatattagctaaaaagaaaaagaaaatgaaagttactactacaaaccatttagaaagtaatgaccatgtaaaactatatgttaaaatttctgtaccaagacaattaaatgggaaaagaaaaggcctttcagcaagtggagctggaagaactagatagccacacaagaaagaatgagttgaagtcctatctcacatacaaaaattagcaaaatggaggagctaaaactctaaaactgttagaagaaaataagcataaatcctcatgatcttagaatagacaatggtttcctagataagacatcgaaagtataagctgcaaaagaaaaaaatacaaaaattggacatcatcaaaattaaaaacttatgtgtttcaaagaatgccatcaagaaagtgaaaggaaaatccacataatgggagaaaatttttacaaatcatgtatcttataaagcaggggtccccaagccccagaccacagactgtaccagtccctggcctgttaggaaccaggctgcacagcaggagatgagttgagggaagtgagcattactgcctgggctctgcctcctgtcagatcagcagcggcattagattctcatggaagtgcaaaccctattgcgaactgtgcctgcaaggtgtattagtccattctcatgctgctatgaaaaaatacctgagactgggtaatttataaagtaaagaggtttaattgactcacagttcggcatggctggggaggtctcaggaaacttacaatcaatggctggggaggtctcaggaaacttacaatcatggtggaaggcaaaggagaagcaggcaccttcttcacagggcagcaggatggagtgagtgcaagcaggggaaatgccagacacttataaaaccatcagatctcatgagaactcacttactatcacaagaacagcttgggggaaaccacccccatgatccaattacctccaccgggtcttacccttgacacatggggattacagagattatgtgaattataattccagatgagattttgggtgggggcacagccaaaccatatcatgaggaatcaaggttgcacactctttatgagaccccaatgtttgatgatctgaggtgcaacggtttcatccctaaaccgtgcccctccccctgcgcttcccaccccctgttccaattttgtgaaaaatatctttcatgaaactggtctctggtgtcaaaaatgttggcgaccactgttacaagggactcgtacctagaatatgtaaagaattattacaactcaataatagaagggtaaataactcacttttaaaaattagcaaaggatttgaatagacagttcttttaaggagatatacaaatggccaataagcacatcaaggattgcttgacatcatcagccatctgcaaaatcgaaatcaaatccacaatgagataccacttcacacctgtgacgatgcctataacaaaaaagatggataaaaacaggtgttggcaagaatacggatggagaaactggaatcctcatacactgctgctatgaatgtaaaatggtgcagccactttggaaaacagggtggcaattccactcccaggtatataccaagagaaatgaaaacatacatccacacgaaaccttgtatacaaatggccatagtagcattgttcataatagccaaaaagtggaaactacccaaatattcatgaactgatgaatggatttaaaaatgtggtatattcttataatgaaacatgcttccgtgataaaaaaaaaaaaaaaagaaatgaagtgctgacatgtgctacagctgagacaaatcttgaagacatgaagctaagtgaaagaagccagtcacaaagaaccccatatggtatgattctgtttatattaaatttccaaaataaaggaatttatataaaatgaagtagattaatgcttgccttgggctacaggggctggagcaattgagggtgatttttaaggggtgcaaggtttatttgtattgtcatgaaaatgttctaaaattgattgttgtaattgcagaactctgtgaatatactaaaagtcattgaatcatatactttaaatgggtggattgtgtcacatatgaattatttctcaatagagctgtttaaaaaaaaaaaaacaacttgttggccgggcgcagtggctcacacctgtaatcctagcactttgggaggccaaggcgggcggatcacgaggtcagaagatcgagaccatcttggctaacacggtgaaacaccatctctactaaaaatacaaaaaaaaaaataaaaaatagccaggcgttgtggcaggcgcctgtagtcccagctactcaggaggctaaggcaggagaatgacatgaacccaggaggcggagcttgcagtgagccaagattgcgccactgcagtccagcctgggctacagagtgagactccctctcaaaaaaaaaaaaaaaaaaaaaaaaaaaaaaaacaacttgtactatgacttcaacttccaagtggaatgtagatgttgtgattgcccaatgttcccaacacaattactggacaaaaagccagacaaatgaccaaaatcttgtttcaagtcgccatacagttgtagaaacaataattagatgaactggaatttcacaggaggagacttctagaacagtaggaattttgctaatgtttagtaaggcctcatgatcagatttggcccacaccagggagagaaaccggagatgtttttgttggtcactcagggctggtatgggcgcaaaagattatataacttgagaagcacagacttaataggtgttttccccaagaaattctctgtgtgctggagatgaacatggaggactcgagagctaggctaagggttcctaaaagacagagtaaaatctgctttattctccaagtgcttgagagactgtatttccccagagggactgggcctaccaactagtcctccaagatgtttgccacatttaaagctgcaggatatgggagctaaagatccaagctcaaatctagaacagtaggaattttgctaatgtttagtaaggcctcatgatcagatttggcccacaccagggagagaaaccggagatgtttttgttggtcactcagggctggtatgggcgcaaaagattatataacttgagaagcacagacttaataggtgttttccccaagaaattctctgtgtgctggagatgaacatggaggactcgagagctaggctaagggttcctaaaagacagagtaaaatctgctttattctccaagtgcttgagagactgtatttccccagagggactgggcctaccaactagtcctccaagatgtttgccacatttaaagctgcaggatatgggagctaaagatccaagctcaaatctagatagtggatttgccacagtcttccatgtttgagggagagtgacccactagtctctcagcccaaatccttgaagggtcttccttgagaaacagggaaggaccaaagatggatgagtcttaggaaaactgcatatgtgtaatagaactaagaggggaagcgggagagagacaatgggccaaaagcaacaactgaagatataatggcaaagcatttgccaaaatggataaaatattaatacatcaattcaaaaattcaagaaaccctaagtagctcagcaaaccccaagtagggtttaagaaaaaagaaaatcatactaaggtacattacagttaaactgctaaaacttagcagatgagctcaagtttcttttctgaagcaaattcatatccttaaatagccttattaaataataaatatttaaaaattttaaaactacttattcatcataagaaattaagaaaataataaaatctaagattcacaggagattgggttaccaaaaataaatgctgaaattaaattatcaaaaaaagggaaaacagttaaattgataaattaataaatcttaaaggtggttattttaataataaaaacccaacaaaagacgtgtatttactttcaatgtttattattttaattaaataaatttgattcaaattaaaaagcacaaatgtgagagtgaaaaaatgacatgactacagattcaaaggaaactacaaaaataagagaaactgcaaaaatatgccttccataaataaatttgatagttttaatgaaaagtataatttctggccaaatataaattataatattttacttaagaagtagaatatctgaataggcctattactatgcatattactaaaaggattattcagaaattttaaaatttactacaagattttacaagattaggttgtatcacataaaattactttatgctatatataatagagtacatatgcataataattggctatatttgaatctcaatttatttttgacattaaattaacttgttaccaagcttgagaaagcactacaaccatgcaactaaaaaaatagcacatgcgacactctcacttatgaatataggtgcaaaaattctaaaggaaattctaacaaatcaatttcaatgctaaataaaaataaggccataccattttaagtagaattattctaggtatgcagacttacttcacactaggcaatctatcagttgaattgatatagctacagttcaaagggaaaactacacaattatttctacccatgctgaaaacacattaataattaagatacatttaaaaattaataagctttatgttttagagtagttttagctttacagatatattgagtagaaaatacaaagttcccatatactccctctccctaccacagtttcctctattatcaatatcttgcattgatgtggcacatttattataattgatgagccaatattgatacactattattaactaaaatcaataggttactttaggtttcactcttggtattgtacattctagggattttgacaagtgtatagtgatgagtacccaccactaaagtatcttatgtaataatagtttcactgccttaaaaatcccccttgtactacctattcatctctccctgtcctccagtccccagcaaccactcatctttttactgtctccaaagttttgccttttccaaaacgtcatagagtaggaatcatacaatatgtagccttttcagattggcttctttcacttaacaacatgtgtttaaggctcctccatgtctttttgtggcttgacaactcatttcttttcattactaaatagtattccattgtatggatgtggatgtaccatagtttatttgtccagtcacctattaaaacacatctgggttgcttctaaatgtcggtagttaagaggaaagctgctgtaaacattcatgtccaggtttttttttctgtatgtaagtttctaattcatatgggtaaatatgagggagtgttactactgagtaggagtatgcctaattttgtaagaaactgccaaaatcactttccaagtggccataccattttgcattcccactagcaatgagtaagaggatctgctgcacaacattctcatcagcatttggtggtgtttatgtttgggattttggtcattctaatgggtgtgtagtaatatctcgttttaatttgaaagtctctaatgatgttgagcatctttccacaagcttattttccatctgtatatcttctttggtaaggtatctgttgagatcttttgcctattttttaattggactgtttgtttcttactattgagttttaagagttctttgtatatcttaaatactagcctgcatctgacatgtgtttcacaaaatcctcccagtctatggcttattttttcattctctgaacagtgtcatttacagaacagaagtttgaaattttaacaaagtccaacttatcaatttttttatggattgtgcttttggatttaagaagtcattgccaaattcaaggtcattgaaatattctcctattttaccttctcagcattttacaagatatatttttaattaaaaacaaatagatgctctgaatcagtcatggtccccacaaggatttttaatagaaactgtaaggaaaagacaacttacaatgggcttggtaaggttaaggaaatatataagggataatgcttgcaaccatgataagctgtcatcacccaggtcaaaaggaaaaaagggaggagctagtgctgggacccagtgtggaggctatggtgaagaagctattattgtgaactccactactactataggtttcatacctaggcaagaagagcatgtagtcctcataagttgatagatataagaaagggggctgggcgcggtggctcacgcctgtaatcccagcactatgggaggctgaggctagcggatcatgaggtcaggagatcgagaccatcctggctaacacggtgaaaccccgtctctactaaaaatacaaaaaaaaaaaaaatagccaggcgtggtggcaggcacctgtagtcccagctactcgggaggctgaggcaggagaatggcgtgaacccgggaggcggagcttgcagtgggtcgagatcgcgccactgccctccagcctgggcagtgagagcaagactccgtctcaaaacgaaaaaaaaaaaaaggagccctaactggcaggaacaggagcaaggatgggggagagccatcattctaagaaatggctgacaagccatcgttctgagaactggttaaccaacaacaacccacttgcacaacaccctgttcccaaataccttgttttgcacatagacccagcagcatgaccttatcagcacgtaccctctccagcacaagcctataaaacttccctccagcccctgactcttcgagacaacctcctctctgctgtgcacctcattgttctcttgcagtgtatcttcgtactttctacaataaatctgcctttctttatccatgactgtcttggtaaattctttcactgcctgcaatgctggacccagccagtcacaccagcagcattttggtggtccatatggagacctctcccctgttcactgttttttctcttctccaactccaacctcttagtggacagcatccaagcctggagacatctgatggccccccactgcagctactccctggtggatcagaaggtcccagtggaaagaagtttgaccgtcactgcccgatcgagtgagagtttagagtttactttcctttcccgtcttctggtggacaaactctagtatccctctagcagctgatggccactggccagggccattccctggtgtggcctaaaggccaaggagtgaaccaggtttggctgccttgcttggaagggaggatggctctctcctaacccttctggtcaaaagtccccagtccctacatgcagcacaataggcagcggcagcttgaccagggcaaacgcacacacattttggggaactcagaccccgtccttctcactctaaatttctcctgtgaagaaagccagccatccttttctggacattttaagcaacatgatcccaaatagcaccagaacagtgagccttccctcaacctttgccccttatacctggattcagcacccagtataattcatacgtggactgacctggggctgctcaccctgtgttcatccatccagtgtaaggctctcatgctgggaggtcctttctaataggtgggatgcccctttggaaagtgcctctcaaggctcctcagtggacataagtggaaccccctttccttggctggaggccccaagagaaattgtggtttgtgtccccagtagacattattttccaatccccccatgggacaaagcccttccattctctcagactcaccgatgggctgcattctaaaacattgggataaacttgactcccagactctcaaaaggaaacatcgaattttcttgtgtaatacagcatggccactttataaacttccagatcaggaatcctactggcttccaaatgggacctctgcccccagtagtattttataggttgacctctttggtcataattcttctaaacggcttgagattccttatatctgaggttgtgtaactctttctaagtttgctctcctctcccttacatggttccttcctttactaggacagctgcatttatacttctacttctcctcttcagtcctttgtctctttaatttactggttaaatttgtttcttccagaatgtagcaattccacagcaaactcctaatgatgcaaggatatcagccaatcaccctcagaaaaccccatgaatctcctctagactcactagatatcaattccatattaacacgctctttcttcctgagttctatcctccagcagcatttaatagactaagtcccataactcaggacaataacccacagggtcccctaacagaccaataatcacaggtagggcccacactgtgcccacagtcagcaggaagcagttggaagataagacctccataccaatgccaaagatttgtcattgttgttctgtcagcggggaacatggagtcctggtaagttaatagatacaagaaaagggctctagctggcaggaacaggaatgaggattggggagagccactgttctaagagatggctgacaagccatttttctgagaaacacctaaccacaaacaacctacttgcacaacatcctgttcccaaataccttgttccacaggtagccccagcagcatgaccctatctgtacatagcctctccagcataaccttatcaaacttctctgctgtgctgcctgttgctctcttgtatctttgtactttctctaacaaatctgactttcttaacccacaactgtcttggtaaattcctttactgcctgtaacaccagccccagcctatcacacctgtgacagatggagaggatgaagtacctttacttctctctcctcaccctcaatagcatgccagtgatccttgctggccaaacacaatcagagggcagccagcaagggagcctgggggctgctgtctgcatgggtgatcatcctggggcacaggcagagccaacatgagtaggctatccctgtgagagagggcacatggagcatgaggaccacagctctttgtgtaaccaaaaattagtgttccacactctagactcttgcagaccaagggttgaagctgagctctagcactcattggaaagttgatgtctttaagcctctgcattttatgtgtaattaggattaataacagtgctacattatagatattaagatgactatttatattaaatgtttgtgaagtattaatgagtgcttagtaaatgctagctgctatcactactgctgccactactatcaaaactactaccattactactactaataacataactactattgtcactactattaccactaccattagtactaccaccactatcatcactaccatcactactaatactatcattaccactactattaccattaccacgactatcattactactactaccacctccaccattactactactaatgctatcattactactactgcttctataattactactcctactcctaccattactactactagtagtatcaccattactactactactatcattactattaccaccaccattactactatcattactactactaccaccaccattactactactgctgtcattactactactgctactatttactcctaccgttactactactaccaccaccaccattactactactatcattgctactattactactgccatcattactattactactattagtttagtcattattatcagaggcgaggagaagcaggcagcataaccaagaacataagtattatttctcaatatgagacagaatctctatattaaattaatagccaaagccatacccaggaatgaaatatttacatgttctcactgaaaccaagaaccaaataaccagaggattgctaccatcattatcattgaatgttctagaaattttagccaacatattaagatatgcaacattaggaaagagaaaaagtttaccttttttggttaacatttacaaaatatgatggttctctgccaagaaaatcactccccaatttaaaaattaagtggctaaacacaaaatgaatgtataaaatttaacggttgttctgaaaactaggataaaactattcataatatttaatgaagataattttccacttacaatagcaacacaaactattaagtgcctacatagctttatatataattttgcaaacaatataaaggctagtaaaaaataaaaacaaaaaacttataactacattaagaaaactgggcacagtggctcatgctggtaatctcagaactttgggaggctgaggcaggaggatcgtttgaggccaggagttggagactagcctgggcatcattgcaagatcacatttttacaaaaaaaaaaaaaaaataggcacgcatagaggcatgtgcctgtagtctgtttacttgggaggctacaggtagctagactacagtaatggtagtagtagtcatggtagtagtagcaaaaatgacattggaaaaatgtcgattttttccaaattcatttataggattaacacaattgcacttaaacttccactgagatttattattaaatgtgttcaagtaaaactaagattcatctagaagaatgaatttataagtagagctcagaaaaaattttttaaatgcaaaacagaaaagattaaccagtgagatttgccctgttatatatagaaacataacactaatatagacaaaatatgtggttttggcacaagaatagattattggaacaatgaaatgaaacagaaactctgggaaaagaatacctacattaatataatgaagtaaacccagacatgtattctgacacattacccccaaagaaataccaggtggattaaatatttaaatgtcaaaaataagccaccataaaaatcttagaagaatatgcagcagaatatttgtgtatctcacagtgaaaagagggttttacaagtataaaggtaatacaaaatagaacagaaaattgatatgacaacatgaaagaaaaccttttatatttcaaaagtcagctttcagtttttcccagtaacagccattgtttataaccttggggtctaagtttccaggcttgtattggaacaggattagaaaaggaattatactatacattgggtgactgtgtcatcaccctctaggatgatttcttcttggaatgagacttaagataccatagttctactttcattgtgcattgatacattaagtcatttataacatttcccaaaactccaatctggagaactttctctatcaccagggcattgctttggaattcagggaggcctgagttctggatgggaatgggagtgagatggtccagtgaatgttaacagtcactattattatccttattttacagaggaggaatattctgctcctttatgagccaacatttactttctctgaattaaatgttactggtttcttatttatagacagcagagattgactgggcacactttcccccacagtttccaagactctgtaattatatgcaaaatagtaaaattaaattcaatctagatgaatccatatttcaataaggatattagtgacttaggtctaaaaattaaaattagactcgtcaatcctgttatgctttccattcaaatgtttttcctaaacagcaacaacaacaaaaacctgatttcctaatagtccatttagcttttatttcatgccatttacaaagtttaggcaacataaatgcactttatgcatatctctgtcccatatctcagtctagatagttgtctagataattttctagacaacctagataatcaatgggaaggctgaatggcagagcagaaaaaccatgtcttcagggtctgaactattgagagtaagtatcatctccaccacttaacaactgtacaactctgggaagatgtgctgggcaagccctttcagtcttgttggcttacccagtagtcaggatttgttgcaagaatacagtgccagctgtgttccagccactgctctcagggtactgttccctttccctttatatgttctgatatttctcccatagctaccaaccagcccattcttccagtctttctctgttcagatgctaatgggagagagttgatggtcttagatagtcaccataatccctttagagcagagatttgttgtagaagccaggccactttgaaggacacaggctgcctgatattctggctgcccttgggtcagatctcatccctggccaaagtggtgccaccactttctcaatgattgcttatttctccctccttcaacatgctttagaaggcagcgtttcccttagaggagcacagtgggctgggcagcaacagtggatgacgtgcgtattacggcactgctgggtatcatcataaccaacatgaacttgtggcttgttcttacaatgcgccagacgtctcatgaaacattcaacgtttcttaattcaccctcacaaccagaatgaggtaagtgttgttcttattcttattatttgatattttatagataaagagaagcttacagcatgaaataactttctcaaaatgataagatcagtaagcggaatattcttttttgtttttttttttgagacggtgtctcgctctgttgcccaggctggggtgcagtggcccgatctcggctcactgcaagatctgcctcccgggttcacgccattctcctgcctcagcctccccagtagctggaactacaggcacctgccaccactcccggctaattttttgtatttttagtagagatgggatttcaccgtgttagccaggatgatctggatttcctgacctcgtgatccgcccgcctcggcctcccaaagtgctgagattacaggtgtgagccaccctgcccggccagtaagcggaatattcaattggattccagagtttatgcttttagctatcaagctatactctttctcactatatttccctgagctttggtttccttatctataaaactggaaccgcactgcctgtttgcctttagagctataggtaataaatgttatgcatttattatggtaaataacatgtagtagagcaaagcatggaaattcaggaagtaacaaagagcagtcataagaatgtctatgtggtaaatctagataaaaattacttgtatacacatttacagtagcgcctttaaaacacacaccgatagcactttagtaagtcaagaatgcatgttgcaccaattagagaaaacaccaattttttaaaaaaacatataaataacaagctaatagaagaagaaatgtaattagaaaaatttaaataagcccaaaaactttaaggaaggacaaaaaaaatcatagaacagagaaaataggaatcaatggtaagatggtagatttaaccttgaattacagtaaatataaacagactaaatattgaaattgaaatataaagctcatcagagaaggtaataatatcaagcaaagctaaacaagctgcttactttaaatataaagatatcgacaggttgaaagtaagtaagggatggtaaaactactatgcaaagcaaaagttacaaaaccaaagcaaagactggctcgtttcagaataatcaacgtttcaggtttaatatgaaataatcgtaaatttgtttatacctaataacatagccataaaataaaaattgacagataaacaatcatgttaagagcctgtataagccagatttctccagaaaaacagaatcaaaaggatatatacattaagaattatattaagaaatttattttagcatattggcttacatgattgtggggctggcaagtccagaatccgtaggagaagctggcaggctgaaactcaggcaggaaacgatgttgcagactttaggcagaattttttcttctctaggaaaattcagtttttgctcttaaggcttctgattgtataaggcccattcacagtatgaaaagtaagatttatgtaaagccaactgattgtagatgttaactacatctacaaaatacctttgcagcactacctagattagtgtttgattaaataaatgggcagtaaaggccgggtgcagtggctcacgcctgtaatcccagcactttgggaggccgaggcaggaagatcacttgaggtcaggagttcaagaccagcctggccaacatggtgaaaccccatccgtactaaaaatacaaaaattagcctggcttggtggcgggcacctgtaatcccagctacttgggaggctgaagcaggagaatcacttgaacccaggaggttgtagtgaaccgagatcgcgccactgcattccagtctgggtgacaagagcaaaactctgtctcaccacaaaaaaaaaaaaaaaaaaaaaaaaaaaaaggcactaaagcctggcccccatgatgacacaggaaactaatcgtcatggagactttatccacacttttgaatatatgttacatttcaacattaaaacacacacacacacacaaaatcataaagcaatcaacaaaattaagctgaatgcttcgtaattgctggattccctgggaagctgactctgagatggagattagcgtgcaggacatttcttacgggttgttcttgggatcaatacctgtggagaggagaagctgaggcaggatcaggaagcggggaagtagagtgcaatgctggtgaagcggcatcactgtctggggtaaatatccggggttcatcatctctcgtcaagatgattaacgacatggacacacatgggtgagttaagaagcggaaagtttaataggcggaagaaaagagtgaggagaccagctctcagacatccttaagggaaaggctggcccgtgactgacggcagcaggttttacgggcaggcttgaggaggcggtgtctgatttacgtggagcccagagattggttcgaccaggggtgacgtttacgtagcgcgcagggaaggctggtcaccccaccctaatcttgttatgcaaataggcttcccacttggcaggggccgtcttgtccactcgtttctgtaaacatgggtggcaaaaagagaagatggagctgccatttagaacatgcctaatcccaggtagtgttttttgttgttgttgttgctgctgttgtcgctttttgagtcggagtttcgctcttgttgcccaggctggagtgcaatggcgccatcttggctcaccacagcctccgcctcctaagttcaggcgattctcctgcctcagcctcctgagtagctgggattacaggcgtgagccacagcgccggccccaggtagtatatttttattggcacaactgccggtatttgcctgtgcaagctttcagcttgcttgtctgtgtctgcagctcgattttccaggttgctttttgttagaaaagaaaatgatttgggggctgcttttcattaaaaggaagaccttactgaggactcccataccttcactatctgcctaagtactttcttcttaactcctatatcactgggtcagcagcaaccccagtcaaacctcaagggagacgggaagatgggacgatctgtcagaggtatgctgagttgaggcaagagagctgacctttatggattgccaatcagtgactcattggaagtggggcaacctggaaggaaatgtggccttaggtgaggcagctgtcttcagaggaggcaatttctttgtatctggaggggcaattgttagtgttcccctggactgaagggtgaattatggagaatggaatagaacgatttgttactatgatttggttgatgacttatttcctgtttccttagcttcatcttgctgagcaaaaatgaaggagcctggacccaactttgttactgtgagaaagggtcttcattcattcaagatggcatttgttaagcacctactgtgagtagatgatctcctgtcaaagacagttaacaaatcctcggaatattgcttcatgtacagttattggagatgagtaacttacattctcttaattgtaatggttccttggaaagtcatcgtggaaaatgaaggctggctcatacattttcccagacaggaatttggctgccaacagggaattctaaacaactaaaaactccagatgatgaatgcacaacataatgatggttaaattaaaaaaaaaaaagagcacggtaataaaatttccatgaaatattttgtgtaagcgcagataatcagtcattttctttatagaattcttattcgtaaataatttagaatactttgttctttataatatatgatgggcaactatagtatgattcttctgagtgactcagttcttttttttttttcacatttaatgactttgtttctcctaagtgaatgcacagatagtatattaatcagggttctctggaaaaaccagaaccaatttattatcaggtactggttcatgtgattgtggaggctgagaagccccatgatctgctctctgcaagctggagacccaggaaagctgatgaaagtcaaaggcctaagagctggagggccgatggtatagattgcagcccaggtctaaaggcctgagaaccagaagcacagagggcagaagatcaatattccagctcaatcaggcaaagagaaaaagtcctcccttcctctccgtttttcttctattctgaccctggatggactggatgaggcccagccacattgaggagagccatctgctttaatcagtccaccaactcagatcctgatctcttccagaaacaccttcacagatacacccagaaataacattcaacctgttaggagtatcccatggctcagtcaagttgacacacaaaactaaccatcacagatacacatcaaagttaaataatattaacacagactttggcaagctgtattttaaaacacagtaggttagtgagtctggtttaagagcactagatgaaaccacatataaggatgtttttgacattctgtgtctgacccttcagactccctgccctcctccccaccatgttctgaaccccagaacactgacctctacgaacagccccacatgggctctgttaccctctggcttcccattggcccatggaggcacagaggaagttggggcaggaggacagaatggttgaggtacggatgctcgagctctcaaggccacaagtcggcaggggctacattcctgtgtgaagctcactacccctcagtcgtctcctctagctctctgtggggtccggtgacctctctccttacagtcccattagccctaggggaggtaatggctctccagggagtgctgcccatgggtgtctcagtatcacttgttggttcccatagccccacccacacctgtgtaaataggccttcattaaccttagctcagttgcctggtttgagtgtaccatctgtttcctgccagcactctgactgataacagcatttttgatataggtctccatcacatgtatgtacctttgtgtcctctgtattcctcattgatcagggttataaattttctcttcctgtgacactaaattgcccttaataaagcttattgaccctaaaagtcaaagggggcaaaatcagagctagtctcaattccttaaagtggacattatacagaaggttaggaaatattaaatacaagtattcacatatgtgttccccccgtcaagctaataaacatatgtatgtgctttttgaaaaccagtgtaaccgcaggttgtctcttgttcctagtaggtgctgattagagcaatgagttccaacttggcagtttttggaaactgaacatgagctgttaatgtctctgcatcaactcgggtttccttttgcttttgtttaaattgaagtttttcacttaatataagatttagagatttctgtctcagagctcgccaagatttgctacttttgtctacccttgtttttaatcttaaaaatttggatttacttaataattccaagtatgaacattaatgttgcttttatcttccattttactgcacaggaggaggggaacagataccaaactactgattattttacttccattgttaatacacatgagaatataagtcttcttgtgtacctggaacttacaaaaattggtttcagctactcaggaggctgaggcaggagaatggcgtgaactcaggaggcggagcttgcagtgagccaagatcgcaccactacactccagcctgggagacagagcgagactccgtctcaaaaaaaaaaggaaaaaaaattggtttttaaaaaattacataacatatgtaatttttaaaacatatgttttaaacatatgtaattttcaaaaaaaaattggtttttaaaaaattacataacatacttatgttaaaatatacataacataaagtgtatcattttaaccattttttaagtgtacagcctaatggcattaagtacatttgcattgttgtgcagctatccctaccatccacctccagaacctttttttatcctccaaaattggaactgtgtacccattacacaataatgccccgttctcttttcctgtaagcccctggcacccaccattctgctttgcctctaggaatttgactactctaggtacttcacataggtagaatcatgcggtatttgtccttttgtgactggcttattccacttaccataatgtcttcaaggttcatccatgttgtattaatagcatgtcttggaattcctttccgaaatttctaaggctgaataatattccattgtatgaacagaccacatattgtttttctgttcatctgttgatgcaaacttgggttgcttctaccttttggctgttgtgaataatactgctgtgaatataggtgtacaagtatttattcaatctttgcttgcagttctttgagctatatatgcaaaaaatgggatcctggattatacagcaattctatgtttaattctgtggaaccaccatattcttttctgtggtggctgcaccattttatattcccaatagcagtgcgcagaagtttttccacatccttgatagcacttgttattttctgttttttgttttgttctgatttatcttttgacatggaacattcttatacatggttacacatccattatggtggtcttcatcaagttagaggctgcaaagcatccatatcattcattcttctagggttaaaggcatttgtaaaatatcaaattcaataacactgctaaatgtcttaaactttgtgtgtgggagggcgtaactactggattttataagtgcttattacacttgaagatgacagatttcttttctattgaacattttaaagaacaatttagttcatcccaactgatattttctgaaggccgctatgtaccaggttctgttacaggtgaatggacccatcagtgaacaaaaccttaaaaaaattacaaatcatttggaaatccactattacagtggcttcttcagggatgatactgttttccaatatgctacctaggaaatgtgcttctttccaaactcactgttatgtctcaagcgattagttcatggctcagaagaaacataagtgagaggtgctccttctacagcccttactttgtgcttgtttctggcactcaccactttcgaccttgtcattcgtgtgcttgttttattttcttacaagactttgagtttcttgacaggatttcatctgtatttgattttctacaattatctgcagcattttgcatataagcattaaaaagatttatttcatttgctgaataataatgaacatggctgttttgtattctttttatgagatggtcagtcacatgcagccacggaggagacacaggggaggctcaggaagacagagtattatactcacaggtcctacaaagaggaggcacgccatgccacgcaggaccacacgggaaaaaacaccagagtggtcaggaggcaggaggcaggagctcaggaaatcattcaacctttactgaggtttcgcgggaaaggcaggtgagcagcttaggatgggctagtttgaatcatcctggtgggctctaagctctagggatggccctagttgtctagtacccagctctggaatggttaaggcagaaattttaaaaaatgaaaatttaaaaaatatatatgtgtacaatatcatacacacatatatacaaaataatacacatatatattgtgtttgtgtgtacacacacacacacacacacacacacgtgacaacttcatgctagggagaatggtgattctagacatcctgaactccagaatgatggtgaaataggtaatgcaagtcacctccccacctgctcctgactcggtcggctccctcggtgggtgagagggttgttggtctgccctttggcgccctctaggtgagaacactgcataggccattctggtctcattgctgcagtttgtacttttcataggaaaaaattagcaagctgacctctgttttggaatgcctcagaagctagaatagaagcccactcactctcctacagcacccctttatccccacacacctgtctttgctaggtaataagcagatgcggcttgcagacacaaagcgtgaatacgattagtaaattcaccttgtgaaatgcagctccaccttcctctaatttggccttaggggttgttttgctatttttatgagtctgtatgtaattagccacaattaaaatctgaagtctctaagtattttcacagtccaatttcatctgaggcaatgaaaaataaataactcacagtgactttattacttctgtttctcagatttggggaagcagaatagtgaagtgggtctcttcacacatccacaggacaggtaggattcgcaggggcttgaaagtcccataactcaagtgcatttcacctgtactgtcaacactgtctatgggcaagacttaaggcagcaacgtccagcaattctttgtgtgcgaggatctcatttcatccttcttccagggaggagaggggtgagaaaaaatgactcccaaacctcttgttaccatcctgtctccacttctgagctctgtcattgtttatgtcatttgtattccagattccaaaaggatatgaaagatctgcctgagatctagtagcatatttccagctggctcttgggaatcaagaatatatacaaagcattgttgacaacaaatgtttatttactctgaagatggtttccccttctgtgtgagtcagggttctgcagagaaacagaaccaatgggatatacatagtgctgtggtttgaatgtgtcccctccaaatttcatgttgaaacttaatccgtattgaggtgatattaaaaagtggagccttttgggaagtgattaagccatgatggctccaccatcatgaatagatgagtgccttataaaagggctggaaagaaatggattaggcccttttgcccttcagccttctgtcacataaggataccatcaaaaaacaccactgatggagcattccctcactagatatggaaccagccagccttgatcttggactttccggactccagacctgtgggaaataaacattctggtctttataaactacctcgtcttaggtgttttgttagagcagcacaaacagacaggacagaaatacatgtaggaggagactggcttatttgattacagagagcaaggagtcccaccatctgctatctgcaagctggagaaccaggaaagctgagggttcaatttagtctgagtctgaaggcttggcaaccaagggagctgctggtctaagtcccggagtccaaaggcccagaaccagtagctctgatgtctgggggccgaggaagatgaatggaccagttcaaaaagagagagacagagaagtcctcctccctccacttttttggtctattcagaccctcaatcaattagatgatgcctgtccacactggtgatggtggatcttctgattcaaatgtgaatctctttaaccatcatagcttctaagttcccacctttcttccatccttgccccatcccttcttctctaacctcaccttgtcctcccttacctctatcctttcctctctctcctgcatacattttgtggaaagcctatgtattaagggtagacacaaggcaaaattgtttctctgttcatggaacttagatactactgcaccagctactggagaaagtattatgcacttgccaagtaatacacaggatttttgtcacttataaacacaacaaagctcaaaatctaccatcatcatattctccttcttgtcactcaaagtcacatcaagaggatgaattgattttgtcctcaggacaccttgtcatgtctcccaactttcctatataactgatggttgttactccagacttttattagattatcttcagtgttgtgggttgaaatgcatcttccaaaagatatgttcaagtcctaaccctgggaatgggaccttatttggaaatagggtctttgtagatatcatcaagtaatgaggtcttactggagtagggtgagccctaatgcaatgactggtatatttataagaagaggaagatttagacacagacacacagggggagaaggccatgtgatgattgaagcagagttggagtgtctacaagtcaagcaatgccagcaatcaccagaagctaggcgggaggcacccaacagactctccctcacaccccccagaaggaaccaaccctgcaaatgctttcatatagaaggcctctccagaactgtgaaggactttctcctgtttcaagccacccagttagtggtgatttgttaaggcagccctaggaaactggtacacccagtcagtgcaataactttcaaatagttctgcttgcctccaacactcacactccatgtgttcccatccttgattactgtggcattctgcacatggcactcaaagctgggtcaatgtgagccaagagaactcaggaaaggagagacataagagagaagaagaccctggagagagaggttttgagactggaaagtaatcatataagccattggatacttgcagaaatcttggggtggtcgctgaacttcccccagagcatgggatgggggaattcaaaggacagagaggcttctgttgccttctgcatgatgtataagaaatctcattgaatcctctctgccactgcatgggctggaactactacctgcacatacagttaggaagctgaggctctgtggggttatctcttgcttaagaatgaccgactggactgacaaagttcagccatagaattagagcccaagatatcctgctctataatgagtattcttccttaccacccttatatctctaaatcaacaaactgggttatttgtttctcttggccctgacttgctatttacctatctggatttccttctctttccctctgcacctggtcaaaagctgctcatccttcaaagtccagtttaaatttaattgtctctatataaatgttcctgagcaccttagcctgaagagacatgaatcagtcccactgaacaagactaactgacatgcatataatttaatttgcacaattgaacacctgctgtgttgtttcttcaattatgggcttggtctctttgcatcttttgttctgagttatttttttcacactgttgtaagctccttgggcagagtccataatttatacatctttgtatacctagtgggtctcagaacagttccttgcacacacaaaaaatgaggcaaaatgaagtcagatgtcttggttctcaatacagtcatctgttctggagttgttaagtgtaggatatcgaatgcttttcttaaacttcctggtctctgtctcctcttctttgacagtaggggtttgaaccagcgaatgtcagtttccttcagctctgttggactggggcactgctcctttagcttagggacacatgccgggaagagggaatgtgggactcctctggcccaatttccaggcacctggggccccagcaagcttaccttgtcagattcatcagatggttggactgtaggcatgaccttggtgttccttgcaggaaacaaaggccaggtgtgatgctggcagtgtgtctgtgtgtctcaggagtctctctgatgttccgtctgaactacatgtcgggagatgccagatctcaatccgacagatcaagccacatgtgcccagaaaggcttttggcgacatcacattcacttaggagctgtggtccatagggggctggggtatgatattctgaatggtgacggaaataagtgttcttattcttgtttacagtgcctttttgggaaaatgggtgaaataaggttctgtgtgagtgtgcatgtgcgtgtgtgtgtgttgaagtagggctggaatggaaacatggggggaaggatatttgaagctctgtagtaccgttccttattgaagtaacacccctcgcctaagtataaacttgtggatggcttccccagtgcaagtttataagtttgtaaaccccaggctctgcagattagatgtatgggcaactgaatttttttacacaagcagagaaattttaagaaatttaaagcataatcatgtacacccaaatgctggtggtttgtgctggcttaagaagcaagaatattcctttggttggtgtagcatttctctttactgaacagcattaaaatagcaacaaccgactatacacttcagagagaaccatctagacatggagagaaaagaatcaatcttgtttgtaggtagcaatgtctggtagtatccataaaatataacagccaaggaaatttcaagggagtggagcaatggagattttgtgcttaaagagggatcaattaattggcaatcatgtacaactctaggtataattatatagaaaacaggcaacatgagatcatttatttatttttatgagggaataattttattttatgctcattttactgaggctaatttcttcttattctaagaagtaaatgtgaacatgcctattgtgcatttgcaaaggaaattcaaacattgtctttgtttcagaagcaaatgctgtaaatgttgctatttcagaatgacttttatcatagttatagatgttctcatttatttgcaaatacatttaaagtgacaaaaaaggaatacttggggatttaaatagcatgttttcaactttaactgcatactgtatttagaatttaaaggggatctctgatctttgttttctcatacgttccacttgaggccacattattctagggcagtggtcctaatccacagattttagtctcttttccccacccctccagggcacatctggcagtgtctgggggcattttgattatcacaatagggagggtcccctagtacaggattctagtaggtaaaggccagagctgctgctagacagcctaaaacacacaggacggttcccatctacaaagaataatccagtccaaaatgtcaggagtactgaaatggagaaaccctgctcaaaaaaaaaaaaagaaagaaattttatttccttcttacaataatccatagttaatctctgagccccattttgtccacaacagcatggtgtcgtgacctaaaggtatatctcaaaagaatctctcattcttatcagtgcagaatagagaaattgtgtgcagcctacgtgtgatttgtcactttagtactctgtggtaggttatttgacatttcatgcttcatagtctgaaatgccctctcttagtatacccatctgacattttcgagagactaatgtttgcctaagaatgcttaaacgatggccagattttactctgagtgatactaccccctggaagtggggggaaaaaaagaaggagggaaaaaagttaagttttcattctaaacatcttcaaagcttgattggctttaataaggtatcattaattaattcaacagctaagaagggactgcaagtgttaaaaatcacggctgtcaaatgttatggcatctgggagccctagtggttggttacttaacatgatattttaggacaattctactctgcttaagcataataaaccggaaagacatgaacaaatgtcccaactgcttccctttctactcccaccccctgctctggaaagaagccctaacacctctaataccacaccactctaaaataaacccaaatgttgcacttattttactgctatgcattgagcattattatttggagatgctctatgctgcttcattaaagatctttcatatggggtggggaaactgagccacaggggatgattaaaagaaggaagaagtcagatgacttcggattctgttggctcctgactagagaacaccttaggaaaagcaatccttcatctgcagcacacagaagaaaccacattccgaacttctcggtgatgagccccgtttcctaacagtgtgaggttaatgaacctccttatttttggcagggtgaggaagtggcaagcagaaaaacctatcaaagggagcccagttccaaggctttaattgcttaggtgactattaagaaaagagcccccttctttcacagcagaaggatacagttctctgttcccaaatctggcagctattcctcaattatagaaagaagaaggaaattaaaatgtgatggattaaataagagggtgaaccggtacttatttcctaactagaaattaccatttttgtgcttttaaattgataattatcagcaccatactttattcacttttgtcataaggtccttccttttaattaaaattgagatgcttcacatttcttgcgttcccttaagaaaatctttcaagtgtttaagtccctgatattggaaagctttaattacagcatagaaaaagaagagtggaaagagctggggcggggggatgtgtcccttcatttcccgtgaacatgatcacactgggaactcagggaggtccagtgcatttgtcaacttgccaaacattatgttcattaaaggccagaaagtatccctggggggtggatacacttgagctcatttccaatcattttacctgctctgcctcatttcagagcccagtcagatcattaccagacttcccacattgtcctaaaaaaatgcattaaaattaagtcacaacagacatccaggtttgcacctgtatctcacacctgtgaggatcgcttttatattgaaataagacaaggttctccagagaaacagaatatatatatatatatatatgtatgtattaccacacacgcatatatatatgtatgtatacatatatgtatatatacacgttttaaattttattaaaaattttaaatatatttattttaagaaattgtcttgtgtgattgtaggggccggcaagttcaaaatctgtaagtcaggtcagcaggctgaaaacttaggcagaagttaatgctactgtcttgaggcagaatttgttttttttgtttgtttgttttgttttttttttcaggaaacctcagtttttgctctgaaggccttcagctgactgaatgagggccatgcacatgatccagttatcaaggagaatctctttacttaaagtcagctgagtaaattgtctaaaaaatacctccacagcacctagatgagtttgatgacataactgtgtattgtatagcctagccaagttaatacataaaactcatcatcacaggcatcaagctcaaatgttagggtttgcagtggactaatgcatacttaagtacctagatgacacccagaagggacaaaagccctgagcttccccactcagcatgctgccacctccatacccatgttgactctctttctgttttcaggttgtaacccacgtattctggttctgacctgctctattttctctttatcctcctggagcaggagtgaagtagcaagtatgttgagtcataagacagatttcactattccttgaatgctgacagaactcagagtcttatgtctcatgattttccacttgatttccatttctatgctttgggtaatgaggtttaacttgcctctccattgggaatacagattcctggaaggtagagaatcttattttctgtgtatagagttcatagttaggtttcaggtgatattcagaaaatacattcagaattttagagatgtatggagttgtgaaactagcaaaatattaatcattcttttgacacagagcctcactttgtcacccaggctggagtgcagtagcatgatctccactcactgcaccctccgcctcccaggttcaagtgattctcctgcctcagcctcctgagtagctgggattatgggtgcctgccaccacgcttgaccaatttttgtatttgtagtagagatggggtttgccatgttggccaggctggtcttgaactcctgacctcaagtgatccactcaccttggcctccaaaagtgccgggattacaggcctgagccacaacactctgcctaatcattcattttaagtgattaaatcatccattcatctacttttagtacatcctacatcctttttccttccttccttccttccttccttcttttcatccatccgtccatccatcgattattaattcaataaatatttactgttttccttcttttgagaggtgtatgacctaaactaagaggtatggagtttaaatgacttgtggaaaattagaatgttttattctctcgtttcccacaagtcatttatatagttgctaaaatttagtaactgcaataaaaatacatgattccggacaacatattctcattttacttacttctaatattgatatcagattggttctcctgcctctgagtctcagttgagatcagaaagcggtgataacagctcattgggaattggccatttgcaaccaaagtttgtgatatagttgggacaactaactgaataactgggtcacaataggagacatcttaaattactaaagctacatgattttggaaagtctggtttcatttatttaactaaactaccagtaataccttatgtttccaactttggtttttgtcagttgagatctggcttaatatccctcatggaaaagatggacaatttaggcaaaaagtatttataaagataaagtttaggcagggcacagtggctcacgcctgtaatcccagcactttgggaggctgagtcaggcagttcacgaggtcaggagttcaagaccaatctggccaacatagtgaaaccccacctctactaaaaatacaaaaaattagctgggtgtggtggtgtgcacctgtaatcccagctactcgggaggctgaagcaggagaatcacgtgaacccaagaggcggagttacagtgagctgagatagcaccattgtactccagcccgggcaacagtgtgagactctgtctcaaaaaataaataaataaacaaacaaacaaagtttaaagaagaagtgtatatttatgtattatttaattaacacatgcaccaaccgtacaactgccttcagaaagtacctttctgacaaaattagaataaaggagacatagtgggtagggaggagaggggttaggtgggtaaatttaggctatgccaaataaaaatggggcccctaggagtggggtgcctaggactagcattggcagaaaccactggagcctcgagccagcatccttttgctgaggcctctgcatagttgatagagcagtcccaaagatgtaaatggagcaattagatatcattcaatttatagtgctcttggcaagaaaaagatctttcagaattcttcatctgccctaggcaaacctttagaggctctcctcttgcttattcacacttgtggcaattttccaagaagaaattccactaaaaagagtctattttttaatccaaattgagaaaatggggaagtagtctaggatgatggtaggagttgaaattctggtgtcagactgccagagtgcaaaaacctggcccaggcctccctcctatctactaagcaggaagggggaggatgtgaagaggtggtggttgggggttggtttaccttggctaagctgctcctctaagcttccacattcccacttgtaaaatagagtaataacagtccttacttggcaaagtggttagaaggactagatgagccacttctgaagaagtgctcagtgcatagtaagcaagagaaatgataactgttgttcacatgtgtacagtgaatgggactattacatgaccatcacatcaatgataattacatttccattatttttccttttaactcataatacctttgggtatttagctggaatgcagcatattttactaaatggatacagtagaatgctccatttaataatgatatctactttgttttcttgtcctcaaatcaaagggacccgagtgcagtggtccagctattcaggaggctgaggtaggaggatagtttgagcccaggaatttgaggttagcctgggcaatatagcaagaccctatctctaaaaaaaatcaaatggagaaaactattggtccatattctatgttatagacaagatacaaaagacaaactcagattaatgcaagttaaccaactctataaaaattcatagaattttattattatttaaactgccttttctaccactgctatatttgttgactctgcctaggcatgctttaaaaattccataaacagctcacgcctgtaatcccagcattttgggaggccgaggtgggcggatcacgaggtcaggagatcgagaccacggtgaaactgcgtctctactaaaaatacaaaaataagccaggcgtggtggcaggcacctgtagtttcagctactcaggaggctgaggcaggagaatggtgtgaatccaggaggcggagcttgcagtgagccgagatcgcgccactgcactccagcttgggcgacagagtgagactccgtctcaaaaaaaaaaaaaaaaattccataaacatgtaaaagtatattcattactagatatccatcaacattgggagagaatctaaagcaacttatcccccattcttttacccagctgtattttctgctaagccacctatctcaatctgagattatattacacatttaaaattttctggtttatcatcccttcctaaaatgcatacctgaggagggtggggactcatttggtcttgcttaccagtgagcctctggtggactgataacactccataaatacatgtagaatgaatgtcaagtaaataaattcagaaaatgggcatttatgtttctaagttgaatatgtattcacaatttcagttaatacccacttgcttttattatttatcttgtgagatatgacatttccaatgcaagccttgccctactgaaaccatcatttgctgaatgtgtaattttcatcaaactgtactttaatattaatcaaaatgaaaagaatcctcttctaaatatttgttgaccttgagcttatatcatgtttgcataatgagatttaagtagaacatactttaaggtgcaaagagatattttttcatattctgtgttacaaacaagacacaatagataaactcagattaatccaagaaacaaaaataaaaaaatgaaagatcaagaaaaagctgttttttttaaaagattaacaaaatgcacaagcccttggtgtgattatcccagaaaaaaaataggacataaagaaataatattaagaatgaaaaaagttatctaatacaggattagtaaagatttttaatatcacaagagaacataattttgataaatttaaatcttagtttagacaattttctagcaattataattttacaaaactaactcaagaagaaataaaaatgtgaataaactactaattgtcaaaatattatatacaaactcgttctaagcctagaaaaaaaactgggagaagtcctcaacttattctatatggttaatataacctagataccaaagtttaaatctctttttttgaattatatgaattttatgaaaaattctaaataaagcattcataaattgaatattttaaaaccccagatacatcatgactcagggatgaggcttgacttgacacagaagaatctactaatgcaattcactacattaatagagaaatgtagagacaccatatgatcacctcaaaaagtgccaaaaaggcaataaaattcaatagttatggcttgtaaaaaccggaagtaaactaaaaacagatggagactttttcatctgataaaggatatccaccaaaaacaaaaataaaaacaaacataaaacaagtaaacacctacaaatctactgtgaatttctccctctgtggctacagatgagtaagtgcagggtctttggcagctaatagatctggaggagcccttgtccttttataggacttagaactttaagtacaaaagttccaaataagtttgacggaacaaataggcaccagcttgggcaaaaaaaaaaaaaaaacaaagctgagccttcatcacaaccatcttggattactgagcaggaatcctatacaagataatttttttaaaaagataaaacaacaactcatataatgtttaaataaacacatattaaagatttagcccattcgttaatgagggaaccaagatcttacagtcaattcaaagaagaattcaaaacacataggcacacacatacgaaataagaaatgctgaaataaatttataaataaatgcaaaattagtcaatatttccagggcaattgtgaactacatctccactgggtacaatttgtttgagtttttatcggcaggaaccagttggatgacagtttttgtggaggtgtgaagtagctcaaagacaacaaaaggcagagcccatgcagaaggtaccaccccaccatccgcttgcccattttaacatctttcacaatttctgttaacagtttaaattatattttgatgttgatctcttttaaatacttgattagggaataattttctttattctctgatgttgctgacgcttggcttaataaagagtttttattttcttatttctctttaaaacgtgaaatcagtggagccatatgccagtgtcagttagatatgtctatggaaagtcagaccacactcctgttgggccccagctggcttacctcaattgctagcaaaatgcttgcaaggaaaatgtggagacagcctaagctacagaaaccatcttgctttttttctgataacataagttttcaaagcaatatttaaacaaaagacaacatgttttttccccaagtaaatatctacagccttcctcccagcctgtcttactcccaaatcatgtccttgttatttgcaggtatccaaatgtctgcatgtgggagcattccttgtggattagggtgttagtgtctaggagtctcctcttttatgaaatgcaaacattctttgagcacaattgcaacatcagctgtgatatttacctaaatgtttcccaaggataagtggcttacgtcagagccctgaggctacaggatgtagggtttgaccagcaagagatttgagggcaggtaggtatcccatgagaaaaaaagtatcagagacacaacagcattatcccaggacatgaggtcctggaggttagaggcagcccacaagaaagcagtgatcccaaaaagagacaggaaggtgctaacgacaaaactcatctttgtgtctactcccaggctgatccgtgattaccaaaatgatccagtccacaatttccaatgctgaagacagaggaaagatttggggctgagagtgatctatgttgtttgtttatatacaagacattaggtaccctgggccattgacctcatagagaacaggcagcatttgttgtctgccaactctggattctgcaggcatcaaaggattagactctcataatgaaatcagccctttaagctactcggaagacttacgatagggatcactacccagattaatttgctaccaaatagagaatgagaggccaagataaacaaaagagagcagccagctggtagggtttgaaaaaaaaaatgcaagccattcattttccttttgttcttgtatttccaattgaattatgatggctcatcttttctaacctgatatgagctgaattttttatgatttaaatttgctcattatatttctattgcagagtggttctctgaagaacgagcctgttgctggctgtcagggtgtcatgatggtattgcgcaaatcctcgaggcagctttccagggctgctgtcagcctgctcatgccctttagccactgggcagtaaatgaggatctctaggactgaatacataatttgagggggttctgtgcaaaatgaaaatgcaaggtaccttgtaaaaaataagactttcatcagagcaacagggagcttctgggtccaggcctcaggccacacacccatgaagttgaccctgggggtctcagtgatgggataagcaaatcctttcccacagcaattacataaactgtcttgccagggactgaaggcttacaacttgggagtcagatacactttgtagctcagaaagctgactttaataaaagtagtgtacctagaagacagctgtttatttgtagaggtggcttgatatgttttgaatttgtgtccctacccaaatatcatgtcaaattgtcatccctaatgttggaggaggggcctggtgagaggtgattggatcacagggagggacttccccttgcttttctctcaataatgagttctcacaagatctggttcttcagaagtgtgtggcacctcccctactctctctttctccttctccggccatgcaagacatatctgcttctccttcaccttccactatgattgtaagttccctgaggcctccccagccatgcttcttatacagcctgtggaactgtgaatcaactaaacctcttttctttataaattacctagtccctgttagttctttatagcaatgcgagaatggactaatacatggctttaccttagatttcttggaatctgtaagttgatccaaattgcttgatgaatgtattctctagggatccatgtgaatctctctttgagaagatttttctcttgtggcttcacttagagtctatctacctttacataggtgcatttatattgaggtgattgattatttgggtaacagctccatgtatactatgatagttataggggccccatttgtattagggtttgtaattctgtcagcatgaagcaatcatttcaacggacaatatttaatttttaatgtaggatttatctaaccaggttctgcagaggtgttcttggggtgctccagtgctcaagttaggaaaacgctgctttaggtctaagtcaggttcgaatcaaaggttttgaggtcttagtgattaataagttctgtgccccttctaatgacggtatgtaagtccaaatgccatatgcaaatcaaatctttgaaggaattgatagaaaatggcaatcttcattcagataagatttagcctagtggttaaaaaaaaattccaaataaccaaatattgaggaataataatgtagcaacaacaacagttttgagtactcacagcatgacagatacttttggtgtatttttccagtcctgtgagataggtccttgttgatcctccattttgcagatgagaaaaatgaagcaagaaggattcagtaactcacccacgtctccaggcagcaggaggcagaagtcaaatttaattccccagaatctgactctaaagcaagtgctttaccctctcaatttcatttctctacacacttgtgctggaaaatgcatgaaagtttgcatgatttcacactttcacatgagcatgaagatcagaatttatggggatatgattgttttaaattgtaggttttattattattcaggcatagtgagttcagcagatcaggagatgactgccattgaaaggatggtttattactcacagttcccaagagcaggaggcagccacaccatacagggccttttggggaagtgccaggattggtcaggaagcagaggggctgggaggaaaacatggacaagagcatttattacagtttctgtgagaaggaacaggtgaggcaggatagacagacttaggattgtctggtttaataattccaaagggctctgggctgcaggggctgtctctcattgcctggtacctggccatgggatgatttgggcaggtgaatggtgggggaggcttgtgagaatctgataaagaaggtctttggggcatgggctctgggttagttggtttgcatctggaagacacccttgtaggcaaataatttactatctttagaaattggctatccctgggaggggcagtctctccagggtcagcaaggccccagatgtcaaagcttcagaattagaagatatgcttaatgcattgacctggaagacctgggctgacaagagggacagggactgctgcctggtctaaagagtcacctcttaggaccagtgtcctcccctttgttaaaagaagacaaagagtccttgaagagtgatcataaaaagatgatgccaaagtgtcttggggagacagccacatttttcagagctgtagccacatgtctcaaagatgtagacttgtgggtaaatggtacttgaagcagaaagcaaatgtgacacttagtgattgtaagtaatcaagatgacacttcttggtaattaggcagagacgataagtaattttttaaaagtttcagatgcctattgcttttgattttctctcctctctttgttagtctcctaatgtcaataagtagaattcatgccaatgacacctaacatcagtcctttctccctggcccagcaaataaacaaaaacacagaggaggctgcctggagaactgagtgttgcctctcacctgcagcacacaggacaagctgggttcttcgggctccacattagaggtctctttcaaccagtacccagatcccagcccaccttctcttggctgagttctggagcagacttccaagtgctcttttatttctgtttggaatctgggagtcttggtggttgaagacataaggcaccaagatatctgggcttggaggggaggattctagagttctaagcaggggcactaagctctagcattgagaagtagaaatggaagagaggagagggacgagtattgtgaacaaaaagttggggtggctgggttttgtacacccagaggttctcaatgaatgagtctccatcagcccctgaggcttcctctctctcaaggggcaggagaatacctggaggaagtggggtaaagaggtcatggagattagcagtttttcaccctttgaaagtgttaggccatgtgatggagcctccagacccagaatctcatttagtccttatacaacctgaaaaagtcttccaaaaccttaggggcaaacacatcccatctctttcatttttccccccaatgaaaatgggtttatcctttaagggcactcttatttggaggtccagtactcccccctttgatgttctctcctcctcaaattgtccacaaacctagagggctgatgtggtccaaatggacccaggtttaatcaaactgtctccccaatgaaagctaagcttcagttggtgctcgctgccacatggcttgagctgagtgctggtcctttccacctgaaagatactgccgggcagctgctgacccaagctctttcccaagacattgtgtttttttaagagtggccaatgatactcacttggagctaaactcagctaataggatgccatgatctgagggcctctgcctttagagctcaaccactagaacaaaaggtctctccctaccccctccttctaagggtggactccttgctactagcagggagccagacagtcttcttagacgttcccctgaaagtaaagctgctacctgctcacccttaggcagctacacctgattccaagctctttcagtatcttgaaattgctcgattctctttctttttcgtttctcaatatattttatttttagagcagtttatgttcacagcaaaattgagaagaaagtacagaaagtttccacacacccccagtctccatacatgatggcatcaccctagtcagcagtccacaccagagtggtacatttgttacaaatgatgaatccgcactgacaacttataatcacccaaagcccatagtctaagttagggtcactctcagtgccatatattttatgtgatttgactatatgtaatgacaggtatccacagagatacctgtatgacagagtgccatgcagaacagtttcactgcactgaaaatcctctgggatcctcccattaatcactccctcccaccaacctcttttcattgtttccatagttgtgcccttttacagaatgccagaccattataacaacacagtatggagcctttttagattggcatctttctgagttttggaaattatgtaaaaacctgctctacatgtccctgagaaggttttgattggatataagttttcaactcgcttgtgaaaataccaagaagtatccttgatgaattgtatggtaggaatctgtttagttttgtaagtaacagccaaattgtcttctgaagtgctagtaatatttttcataatcaccagcaatgaatgagagttcctgctgccccacatcctcaccagcatttggtgttgtcagggttttatatcttgtctgttctaataaaagtgtagtgccatctcattgttgctttgacttgcagtttcctgatgacatatgatgttgagagttttttcatatgctcatttgccatatttatatcttttttgacagagtgtctgttcaggccttttgcccattctttaataggttgttcatttttttgttgttgttgagttgcaagtattctttgaatatcttgaataatatttctttccagatatgtactatgaaaatatttttcttccagtccatggcttgtcttctcattctcttgacaatgtctctcacagaattttgggtcttttttgtttgtttttaaatttcaatgaaggtcagcatattaccactgtattcatggtgaattagattttctcctgtcttcttctaggggttttatagttttgtgtttacatttaggtctgtgacccattatgagttaatttttgaaaggggtgtaagggctaggcctatagtcattttttttttcctgcatgtggatgtttagttgttacagcaccatttcttgaacagattatcttttctccattgtactgcctttgattctttgtaaaaaatcatcagttaactatatttgtgtagatctatatctgaggtctgtattttgttcctttgatctatttgcctattgttttgccaatacaacactctcctgatgattatggcattgtaataagtatggaaggtgaataatatcagtcctttcactctattattctttaatattgtattgattattttgagtctttttatcctcatataaactttagaagcagtttatcaaaatccacaaaataatttcctggggtttagattgggattgtgttgagtctataggtcaacttggacaaaagtagcatcttgacaatattgagtctttatagaaataaaaataaaatatttctccatttatttagctgtttgatttctttcatcagaattttgttgttttcgtcttgtacttattttgttagatttataagtatctcatttcagaaagtgctaattttaatggaaaacaatttatttttaattaaaattcatttttaattataatttaatttataggaaaacagtttaattttgttaaccttatatcctgtaccttattataatcactagtttcagaaattatttttggttattttggattttctacatagacaacactgtcatttgtgaaaaagagcagcctatttcattcttcacaagcaatatatccgcttttctcatattactgcattaagactcccagtaaaatgttgagaaggggtgctgatagagaacatccttgccttggtctcgacgttagcagggtaatttctagtttctcaccatgttggttatgatggtagctctacattttttaataatattcattatcaagttaaggaaattctcctgtattattgagctggtttttaccatgaaagggtattcgattttctcaagtgctttcctttctattgatagggtcatgctatttttcttcttcatatataggatggattgcattactttctttttatttgttcatttatttattttcttttcaacttattttaggttgaaagggcacatgtaacaggtttgttacatgggtaaattgtgtgtcatgggggctttgtgtacagataattttgtcacccaggtgatcggcctaatacctgatagatagtttttcaatcctcaccatcctcccactctcaacggtggactggataaagaaaatgtggtacatatacaccatggaatactatacagttgttacaaaatgagatcatgtcctttgcagcaacgtagatcgagttggaggtcataatgctaagtgaattaatgcaggaatagaaactaaataaatacttcatgctctcacttataagtgggagctaaacagtaagtacacagggacacaaagaagggaacgatagacactggggtctactctcttaagaaaaggcaagatgacattccagtgtccacctggctagaacagaaaaaggaaaaaaaaaaaaaaaagaacattgactcattcccagggcatcttcctacacttagattctgaaagatagtattctttccatcactcctttcctttctactcttagcacaaatatccttaaacagaattttagagccgaagtcaaagtcactttgttccacatacataccccaacatctgctacttgttctcttgatacttaaattcacttaacaggagatctggccttttttccccaagctttaattaatggttaaatcttctgaaaggctagcagaagtaatctgttagtgcaattgggtttcactcctaattcttagtgtcattctacagttctttctcaagccgtgacctgtgatcaccatgatcagggattggcaaactacagctcatgggtcaaactcagtgagctgcttgttttgtacgagctgtgagtgtccacaaaagttttattgaaacatagccatgcttcttcgttgtccctattttcaaagaccagttttgttctatgacagcagagttgagtagttgcgacagagactgtatttcctgcaaaatctaaaatatttactctctgactctttaccaaaaaaacccccaaaaaacaaaaaaaaaattgctaactcctggtctaggtagtgtgaggttcagtttctggctccagcactcactattggggaggcattaagccagtgccattctcctaggaagtgctccacatagcagctattggcacacaagtcatgtggagatggggaatcctaaggaaaagaacgatcgactttggataaacttattgaacttttaaattctgacagtatcctgcttatataatttctgcacatatggaatctgcatcctgagtttttttctatccagttcatgtttgtacaagtatcttatatgtgcagatgatgaaacagtgcctttaagcaaatgcctttaagcaatgcctttaaacaatgccttgagcaaaatgatgtatttgagtgagtttattgtcagtattaccaagcacaatgtttgactcctgctttggtaatgtcaggaagtgtggcagatggtggggagacaagaggagtcattcaggaagaagccaggagctcccaggataaaagaagcaattaaaatgcaacccttggatgggctcaaatgcagtctgcctcctcttccttatcacgggccagatccagtctttcttaattgaaggggtcaagctaaagttcttatcaacaaaagtgatgttgcttaggaaagtcatattccttagctaattttaggtgctgttttgtgcttcctgtgttaccaaccttctaaacagtaaataagagaacattgctgtctataaaaaaatcttttagttgtagtgtcaacttacaaaagaattgacaaaaaggagtggaagttcttttaagtccttgccaggctgcagagcagagctagaagaacataaagtcttaatcctttccctgctctttaccttgggggtggtggatgtttttcagggctctgtgggggactggcgtggtgtttggtcatgctgactggggagccagatgatctatctgagctctggtgttggctttgccatgtattctgaaccgtcgaatcaacccctattccaggatggttgattttatgtgtcaacttggagacattttgggatgaaattaacgtttaaattgatacactaagtaaagtgcattgctcttcataatgtggatgggcttcatctaatcagttgaaggcctgagtacaacaaaaagaccagcttccccgagcaagaggaaattcttcagcaattgccttcaagagttcatctgcaccattggctctcctggtctccagcctgctggtccacactgggacttggacttgccagcctcaataatcatatgagccaattctttataataaatttatttaaatacacacacacacgcacacacacacacacacacacacatgcgcatttgatttctctggagaatcctgacaaatttaattctatgaatagagtaaaagtctctgttaacttataataaagttcctgttcattttaaaataaaaaaaggtactattggctcctggttgagtccttgaccatcatatgcacacatgctttaaccccagacagacagcttcattcttctttcttgcacaggcaaaacggcttctcatctttggagtagtcgagagtctaggtgctggatccagactccctaggttcaaatccgagctctatcacttggtagctttgtgaccttgggtaaaccacttacttactctaggcctcaattccctcatctgtaaaatggcaaaataagaatactcaccacataggattattgtgaaaagtaatgacttaatgcaagtaaagcgcttaacaaattatctggcactcagtaaatgcttgtcccacttagaatagacctggtttgtctgcagtgatgaaacatcagtctgctgagaacttggctagaaatgcttaagtagttgagtggagccttaaaagaagcaagtaaaaaaaaaaaattctgctatgtgcctgaaggagggagaaatgaaatccttggcaaatagaatgaataatttccccagttactattattaatatgtattatgtggctagcttcaccttgttttcttgctcagggaaaataatttctttgaatattagattgatgcttctatcaaaaagcatcttctctgtcctgtttaacagagaaaacatggttcccctcctccagtagttaaagccctgagctgtgtcctccagtgcccaagcagatagcatttagtatcttgggctgttatcaaggagcttctttatagaaggaattacaccttcggtggttgggggtgggggaaatagttaaaatgcaaatgtatcagtatttactagcttttggagctcacgtctcgcgcatttcattctgaactttttgctcaatgcctctgaaatcacccttgctaatttaggcccctcggaaataattccaccaaggcagaaaattggcaaccaaagaagtttcactggcctttagatcattttctttcttaacttgtaattttccgttgctttctgttctccattaacttttcatttgtccattatattacatgtgtagtggcaaccttgattttgatacatgatgtatattcactgagcaagggggttgatccattatgtggaccccttctgggaatatgtggactgtgtctatcaatttaagaatgttatatatggaaacataatgagtattataaataagttttaaaaacctatgcacacagataatgaacttcagggacattttaaatgaattttccttgtttttagctgaatacccaataagagtctaggtatattataggtgagtgatctgtgcccttgataaccttgaaatttggaatttttgtactgaataagattcatgctaagcatttaagggcagtctgttggattcatggcaagtgttatctattggattcataagatggatcttggagaactttttataaatagataatcccatgtgctatacctgtgagattcctagagcatagagataatcgctctttcaccattgccatttataaatgtgaaaaaagtctgaaaactcagtgaggagccttaaagaatgtctaggcacccaactcttgatgcatacaagctacccagtgtaagaatgtgcatcttatgaatactgaatattcagcattggttgaaaggtgtgtgggataatcgtgtgatagtgggaggaggatggcctttattatttgtaaatatgatatttaatgcaacccaagttttaattttaagccatttctcattagtgcatcttcatatgaaatttgaatagtatgaaatcaattatgcagaggaaaagtacttgactattgataggaagaaggaatgctgtattaggagtcaggagacatagctcagtacttactcagtatgtgactttcaacaaacaattgttcccctctaagcctcagtctcctgagttgtaaaatgaaagaatgacactggatcctgtttctaggttcctttgcactttcaaaatctttaagaatcttttgttgttgttgacaaaaggatttaaagagtagggacaagtgaccatccataagtgatgaaaagaaaagttaacccaagagatacataaagtggggaagcagcagagttacagttggagaaaccagggagtgaagtcgaggtgtgccacattccctctagatgactcttgaagggttgggtttctcttctgtaaaacagagaccatagctcagaggtttgttataaggattaaatgagataatgcataaaacatgcttccaggaataaagaatcatggaagtgaataaggaagaaaggagatggaggaagaggaggaagagaaaatgacttagaaaatgtgtgattaactaagtaattaatccttctaaaactttcacattcagccaaagcacatttgtgcatacaactctcatttgtctaccttggaataatcaattttgtgagttattcacagaagatgagtgaactcagccaggttttctaatactctgctaccttcttgttcacctattttctgactaggaggcatgtaactcaagttttcatcagcctaagcccaaccacattttggagacatgtctgcatcacaaattatcttgggctttcaaaaatcaaaaataaaccactttaccaaaaatcaatcccactccatcactttggtttctctgtgccttgtgcgccattattggcatgaggagttgtgagctaaccgtgccacattttcaggagcctttgtgccatcctgtttcagcccttgacaggtgctcctgcggggttctcaagctttccttttgatttccccaggatattatcattgtggctggtcaagggaggggacatcctgagaaaatcagccaacagttcctcctggaaaatccaagctctctgattagaggggcaagaaatccaactgatatgtatttaagcacttttatagaattcccgctatgtgccaggtgcacatagttcctaggtaataggatgcagcagccaactagctgaccaagtcctcttgaagctaacattttagtggagaatgtagataacccctcaaaaaattaataaagaagaaataaaatttttgataatgggatgtattatgaagaaaaataaaagcaggggaaggggcagtgaaagtgatggggtggtctggaaaggtcgatctgaggaggtgatttttgagatctgaatgcagtgggagaacaagccatggggaggaatagagaaaaagcaatggaggcacagaaaatattaaatacacagtgggtggaaacaaacaattaacttggccagtgcagctggaacagggtaatggttgaaggacggagcccattcaggtaggcaaaggttggagtttcaagaccttgtcagctaaagtaaggggtttggatcttatcagaattgagatggtaatctattgaatggttttgagttggagaatgatgcaacttatttgcatattaaaaagattactctgactaacatattgataacagactgtcatgagaccagagtggaagctggttagtagatgactgaaactgtttaggagagagaagaccgtgcatttcactagagtagttatagcaggggtagtgtagaataatgggattcagtacatattttggagaaaaatccagcctgacttttcgctgtgtttatgtgggacgtaaagggaaagaaggagtcaaggataactgctaggtttctgtttttagcgactgggtaaatggtggtggtgttaactgaggagatgaggtgctgtatcagtgaggactcatgcaggaaaaaaggaaccactccaggtgtattaagtatgaagtggtttaataaagggaatcgagtgctttcaaaagcattggattagctgaggaaacacaagttagagaaggtgcccggtagtatttagttctgctgtcactgcttgggccagtgaattcagaagttgttgctaccactcagatgaggaaagtaaaggaaaactagtgctgccctacagcactgagaagagtaactggaatggatcacccagaagccaccgcaaaaactcttgtctgccaaagctttcgtgtcctacattgatgcatggggaagaagagtatgttctgtgctctttcatctttgaaatctctcactagtgcacctcattagcagaatatagctgcaaccagaaactgaaaggcagaagaatctgacagataaagtttccagcctttcagctggcattgcaaaagaaagcatataacacaggacagaggagagcaatagaatcttgtaggctaagggacagataataaaatatttgtattgttatgtcataaatctgtgtgtctatcggacatccaagcagaagtgtcaagtaggaagtagaatacacaagtccaggaatcatgggaaaggtcaaggatggaaatataaattggggagccattagaacataaatggtaattaaaggcatgcaagtggagagtattacctaaggagtaagtgtagatagagaaaggtcttagaactgagctccatatgcttcgggaaaaacttggacattggggaaattaggaagcacttctagggttaaaaggactgaaggccgtgcacggtggctcacacctgtaatcccagcactttgggagcctgaggcgggtggattactggagatcaggagttcaagatcagcctgaccaaaatggtgaaaccccgtctctactaaaaatacaaaattaggcagtcatggtggcatacacctataatccctgttacttgggaggctgaggcaggagaatgacttgaacccgggaggcggaggttgcagtgagccgagatcgtgccattgcactccagcctgggcaaaaagaacaaaactccatctgaaaaaaaaaaaaaaaaagacaagttgggactgggacctgaaagaagctcagacaaatggcttacatattgcagtcaagactacaagagggcttagaggtcaggaagaagaggagatgccagtcaatgcgactgacaaggtgggagagcagtctacagagtatggtcctctgaaagtcaaatgtcaaatactgatgagagttatgttttgttttgcttttgtttttgcttttgtttttgttttgagacagtctctttctgtcacctaggctggagtgcagtggttcaatcacggatcactgcagcctccacctcccagttcaagaaattctcatgtctcagcctcctgagcagctaggattacaggtatgttccaccgtgcctggcctgatgagagtttttgttttttaaattaaattaaattaaattttacgttctgggatacatgtgcaggaagtgcgggtttgttacataggtaaacgtgtgccatggtggtttgctacacctatcaacccatcacctagggattaagcccagcatgcattagctatttatcctgatgctctccctcgtttcagcccctcgctgacagaccccagtgtgtgttgttcccctccctgcatccatgtattctcattgtttagctgccacttgtaagtgagaacatatggtgtttggtttcctgttcctgtattagtttgctgaggatgatggcgtccagctccatccatgtccctgcaagggacatgatctcgttcctttatatggcttcataatattccatggtgtatatgtaccacactttctttatccagtctatcactgatgggcatttgggttgattccatgtctttgctattgtgaatagtgctgcagtgaacatacgcatgcatgtatctttataatagaataatttctattcctttgggtatatactcagtaatgggattgctgggtcaaatggtatctctggttctagttcttggaggaattgccacactgtcttccacaatggttgaactgatttacattcccaccaacagtgtaaaagcattcctgtttctccacagccttgccagcatctgttgtttcttgactttttaataatcgccattctgactggcgtgagatggtatctcattgtggttttgatttgcatgtctctaatgctcagtgatgagagttttaagaagatggagtatgagagttcaacactgtatttggccagatggaagccgtaggaaaccttaagcagagtagtcttcaaaatcttgaatgaagtggatggaggtggggatagagaatgtgcagtgagcaaataaagagagaatttacacaattctttggactcattgtgatgtaatataaagagagcagaaaaaaagagcagcagttggaaatgatgtagaatctggggagagaccttttaaagaaaggtgatatcaaggcttgtttgtggactgagaatgatgtgtgatcttggaagtcagcttgagaatggagcagtcaagacacaaattggttggcaggtcatgatcagcatgagaggaatctctatcctgcttccaggctatccttggcactgtgatttttaataaaataatgcactgactttgcattcaaagaaattactggacagtcaaaatatacacacatatgcaaaaattgaggagcaatttcccataagatgtaagcaagagtaatagttattttatgttatttctgtaagtgttagtggcagtaagtaaagaatgaattgtaaaattgtgacagggaaggtagaggagtgctttttgaaacctattttccattagatcttaaagaaagttgagaacataaatttgtggagaagtgagggtgaagattcttaagggaggcagaagcaagatttaataacaatgcagaacaaggaatcagcaaaacctgttgaaaacgtcagaaaacttaggggaagctggagcagagggttagagttgggagacctgagtgagggtcttggctttcactcagtgtgcagtcaggatccacctaatgtggaataaccatggggttctggaatgggctgagacagtgacatatttgcccatattagtggatccatgaatcattttctacaaagtcttcttgttttgtttttcagacaaaccttggaaatcaagaaagttctggaatgatgaagctgttcatgccaagaccgaaagtgctggcccagtatgagtccattcagttcatgccgtgacaattttcttggaactcctttttattgttagttctcacttgtttccatatttagtgaatgtacatttaattgcaaagctgtcattaataaaaattcttatagtacctcactgcacaaacatctttcctgtgtgctaggcatttccaaaagcagaatcattctgtatctgatttgcatcatcttatttaaaccaagacagtattggccatactgtctaccaaaacaggctgtaagaaattacaataatttttgcagctatagggtaacaatctatctcttatgggtttccagaaagtgttctgctctatatgattttaagaaaactgggacattggtgggaggatagtagttgggaaatgcttctaggattaagaggattgaagttgagactggaggtaagcttaaaggaatggctgaagtatcccatcaagacatcatagtgtcattataatgaccatgttctcttgtgaatcctcaccaatggtatagaatcctttgatttcaatttctaccactctgggaaacccctaggcttgtgctcctggtacatcagcccatttcatggtacgttgaagcatgcctccctgtgggattgctggattcccagcccagtgaggtaatgaccaagcagcgtcttcagaggaaggatagctgtacagcgtggtgaaggactcaatgagaaggtaattgatgcttcaccttttcttattttctgtaaagtaggggaatatgagtcctccactgtgtgcttttttgtttgtttgtttgcaagcaatcaaaattctttaagcttcttggaggatgggattttctagaaactgaaatttttaggggtggttggggtctaagcaatccagagaaatatgaatgcaacctcaggggaaaagatgaaaggtgctaaggaggaggcagaatagtcctataaagaaaaggcacacacatacatgcacacacacactgagactcacacgtatcttgttaaaaacattacagcaaactggagttcttaaatccccagtgcatagagctttgggagggtaattctgttaacttaaagggtagtcctctgtaatgaatgcagttcttgtgcatactcagctactgtgctctaataatgtcttactgagcttgaggatctgtcaggcaaaatatgctgatcttctgtaccctgggaactttctccaagtgaggtcacactgctgcccagctcagttctaggaccgctctggtgatgcgattttattccatgtccggcgatttagaaaacacagagttttgagtttgggttccttctaatgaatccattagtggttgtggtgggtttcattgatttcttcctgatgatttgtcttctctttaaaactggtgctatttgtggtttagtgatatgtacttgtaaggatttgggtctgatgtttggtccatcagccagatcatctgcagtttgggattcttggtaatctaagacccaatgtctgaccccttctgacctcattctgtacatgctgtttagttacagtatgagcttgttccttaaacgttccaacagccactgggctttcaacaaatgtaactgaatgaaagacaaatctttcctgtgcagatttgcctgtctaaaacacagagttaaaaacacctctcattacctccttataattatatgcttggcctcctttgaagccaaggtatggcttttcaagccagttgccctgtgacgtgagagggcagcacctttctgaagacggttctcactactgctacaccttgtgctgctgaaagcagcaggagctctgcaggtgaatgtgatttctctgtagctgcccaaggcagggccctgtatcctatggttgctcagggggactcttgggcagaagatgcctgcagatcagctttgtagtgacctccaccatcctggtctcagccatttttccttggcaccatccaggccgagcttattgcagcgaggaccaagatgtcctcatcctcaagcatgcctcatgcaaatagagtgaagccggctcatttccagcattttctttctgacattaaatgtttttctggcagtaggtttaatattactctaggcaaaaccctagggttttacacaaatcatttatcatttggacgtaattctcactatttaagcacctccagtttctacgttattgaatgagacactgtggccctcacccttccatcaggatggattgggtgaagggtcttatctaaaattcccagtgtgctctaattgtcaatcaacaattcaaattaaacaagtgacctccactacctacaggatagacttggtgcaagtctagttttagtgtgaaaagcaatttccatatagacatagaccataaaggggggctcctgtaagggtctgaacaataggtcattgtatgtgactagaaaagtggggagaaaaaaacagagaaatctccctacgggtgcagcgtttttggttttatagaaagagagaaaaacaactctttttgaatcaaatcatcaggcacaaaaaacaaatgctgccagagtaattatccctggaaaaactcagtcctgagggctctccacgccataggcttcctgatgccacctgcagctcatcccaagaaagggttggagatgcatcagcagccttcggcaaaggggaaacaccgtgcagcagggctgacttggcaaagaggcacccccagaggaatgcgaggtgcagcttctctccctttccttcttgccatgtgctgagagcccatgaccccaggatctttctgcagtccttcccctcaggttgcttagacaaggaacttaactgcacttcaactactgaacagtagaatggggtcctaattgtaaccctgtcatggattttgaaggatttaatgagacaatcaatgggaaatgcttggcacacagtatgcccccaagtcagtgaagttgcttccattcccaacctcggtcttcagtccctggtcatctcacaagcaactaaggactcaacattaattcaagggacagatctgattggaggggcctccaagatgagggaaggtcctctcggccactagggggcactaactacatggaaaacaagcactgaatttcggggacttgctccactgccctgcaatgtaaatcctgtaactcatttaattttcttggagcaaagtttgggaatggttgatacagatggtgctatttctgcttgggaaggtggttacacttacatgtcaaatgaagaaacttttcttagctcctccctgtgactcaccagctccagctattatgaactcatactttaaaatatttttttctattcagccccatttactttcagtcctctttcttctgtattctccaattcctggaaaaatagacaatatccttagttgtgtggaagaggaagaagagttatgtagaagaaagaagcatccttactgtaaaatgtttctgactttttgagccaaccacgtctggatcagatgtttccatctagagtcataccttttcatagccttttaaacctggctcatgagaggaaagagagagtgcaatgtccctgagatatctaggaaaccatggagaatttcttatcagaattaacccctattgttttgaaagtaactagatcctaggaagcatgagatgccacgggcttcccagaacccatagcaggtgagaaagaactggaatacagggtgaggtgtgatgaatcgaactgcttttcccagaacacagaatacagccaaggtatgaaagctgttccccagaggggaaaaatgtacactggccaatgagggtgcatccaagagcctgtaggctttcttgggcattgattaaaccaatatgccaggcatcacctgcttgagaattactagagatgtttgtcaaacccccagtccctggaattagactaccttgatgtacatctcagaaatatgcaactactttgaggtggttttacatttcctaaaatttaagaacaattgctctagaagataataattctacctccactgacactggaaatacatgtaaggatggctctgcatgtccttcatcacagcaagttgacattttctagaatcactgaaaggaattattgctataaaaaaatccaatccaacaataaagccccagatgatcagaattgttcatcccgaaactcttcatgtcccagaattgcacatggtgtctgggacacttgctggagtggattcctgtgatcggtgacctcccagtttgtgtgccgacagggcttagagctgcaggcaatgcagttgctacacggtatctcagtgtcaagaatcaacagttccatggagccaagagggtgcaggttggcagtggttgggtggggggatctgtttgcaagacggtgtcatggagcctttctgtggcattgaaggaacaaagatacaggggcacaaaggacatggcactttgtgctgctggcactgtttctacattgagtgacctccccaggaaatccccactgaaacacaaggtgagttttgccagatttaaacaagataattccagtgagtttatcaggaagtggaaatggagagctacattggaaatctgttttcagacatcccgtgtccatttctgtttctggaaaccacttctagatgaaccttggactcagttcatcttccctttgctctacattctctgatttccaagcaataaaaccaacagggctgtatttctctggacaagaccctcacctatcagcagaaacagaaaagcaaatcctccccgaaacagcagcttggggaagtggcccattggatgcctttttctagggctgtactgtgagaaaatgtctttcattgcatctacccaatgctcaaagttacttctcattgagaagaaatcatagatttgacaaaattgtgagtgaacactaaagaacctgtcttctggaacgtacctgtgaggtgaaaggaaaggaacttatgtttggtgtgtggactggtgggatgcaggacaggcttcatcagggtgtgacttgtgccactgcacaggggcccatgctcagaagagctttgcacttggtttaatgccctgatggcaccatcctgaaattcttttttcttttttgttttttgagatagagtctcattctgtcgcccaggctggagtgcaatggtgcagtcttggctcactgcaacctccgcctcctgggttcaagcgattctcctgcctcagcctctggacttgctgggactacaggcctgcatcatcatgcccagctagttttagtatttttagtagagatggggttttgccatgttgctcaggctggtctcaaactcctgacctcaagtgatccgcctgccttggcctcccaaagtgctgggattacaggtatgagccactgcgcccagctggccatcctgaaattcttaatactgtgtaaacaagggtcctgaattttcattttgtcctgggctccacaaattacacagcttgtcctggtaggactgcatggtgggatttggagagctctggatttaaaattaggcagtcttggatcagatcccgctcttctacttagtaactgtcatcttagacaagtgatagcatcctccctcccagcctgagttctctcatctacaaaacagaattacaaacagaatcccacctttctggtgggattgttgttaatactgagtgagttcacctggcatatacagctagccttgaccctggcatgaagtcagtaaatgcagataatttgtactcaatttaagtaaattgtatgtcgttcttgaaatatatgtgagtgacctgcaatttaatataataaaatatgtatttcttgagttgctcttacatgtactatgcaaaagttcatatttacaatgcattatcatggctaaatcataaatatgggaaagtcagttaaataagactttaaaagaagaacccaagtctagtcacctaacacttacgaggcatttctcattgagaaaccggattatcttttatagcctctggagactcagagcctatcccaggttcctacacatccaagaacaaatgtgtcctgagcagatgaatgaaagagtaagtggacccctcaggaaaagagcgtttttaacaccctgaattaacctctcaatattcctctaacaagaaaaagtgttaggacactggggccttaacattagctttcctactcactgagtgatcttgacaagttacctaaacttttatttatgtatttatttttgagacaggatctcactcaggttgtcaacaatcgagggtcataggttcttcacccaggctggagtgcagtggcaggatcatagatcactgcagcctcgacctccctgagctcaggtgatcctcccacatcagccgcccaagtagctgggactacagggacaccccaccatgccgagctaattttcttttttttggagatgggtctttgccatattgcccacactggtctcaaactcctgggcttaagtgatccattcaccttggcctcccaaagtgatgggattataggcatgagctactgtgcctggccatcctaaacatttggacttcagattcgttatttgtgaaatggaaagtgaagtcatcataaaatctctttcaacgtattggaaggaagattaaataaacttataataggtgaacactttttgtaaactctacagtggtgtacaaatgggatgtgttaactttatatactgttgttgtcagtccagtgattcccaaaaggtgaccagggaaccctagctcctcagggataacaagcaaagccagtatccttttcagcctcagaacttaccagagcctttgatgtgctaatgagcactggaacactctgtaaaagaggagcatggtttgtggcatttcccaaatacatttgtccagaatcttctgtcagagaactccttaaaggattcacgttttagtggggcacccactggaaaacactgggctatcatgtggactgggcctacatgggtttatttggtagacatggtgccctgctcacccatcctcttcagcctctctccctcgtcatgcaggcagtgctttcctgaagagtaacaatgaggagatgggagaaagtagattatctgtttcttaactggctctttacctctcaaataaccttcctctttggggcatttttgcacagttctctctagatttaatgcattgagggcaaaataattaacccaagactgattgccatagttattattattgttctcctcctcctcgtcctcctccttttcctcctccttcctctttctcttctcctcctccaacttctccttctactcctgctcctgctccttctccttcttcttcatctctgtctttttcttctcttcttcctcccacttcttttttttaaactcaactatgtgatgatttcttcttttacaacaattttattgtcatagtttggcatagtttacaaattttcaatgaaatataaaccctaaaatttaaaatattgctctaagaatttttaaaaatagagtcatctttaagtgcaaaggggcatattattcaaattcaattttgaagtttatgtttgtacctttcctggggttaggggccattttagaacatggtaatcatggacagtatctgatggtactggtggccatttcaatagctgttagctgcaaattcaacaagtataggatacctgtctccttcttgggactttcatggcataccccttttcccaataatgctgtgtggtaaaaaataatagtaataataatgctgtgaggttcagagagactgaataactctcaaaagtcatgtaaaaaagatatatgacagagttactatttgaacaaaggttttcagactcccaggtattccctgcaaagagaaggtatgaggaacaacccctttgtctctgtgaccccacagaagcctctgggaccccactttctgattcttcctcctattcctttttgtctttgatctgcttctatttctcctctcccttttcctcttgtcttttatctgatccttgccaatcgtgctctccaaaatgaagaacctatgatccctcgattgttgacaacctgagaacatttcttgccctacccaggacagaaggaaatgacataaaaacattttattcattgggtgaaatgggattatttttgagctgctctgttcaacatcagtgaggctgctcaataaagagaagaggaaacctggcataaaagaagaaactgggcttcagctttgcatgcatatacatgtttattgcagcactattcacaatagctgcaaagacatagaataaacccagatgcccatcaatggtggattggataaagaaaatgtggtacaatacaccacggaatactgtgcagccataaaaaaagaaaattatgtcctttgcaccaacatgggtgcagctggaagccattctcctaagtgaattagtgcagaaacagaaaaccaaataccacatgttcttacttataaatgagagctaaacattgggtacccattgatataatgacaggaagagcagacactggggactccaaacatggggagggagggaggagagtaaggactgataaactaccaattgactactatgtttactccttgggtgacgggttcaattgaagccaaaaccttagcatcatatccatataacaaatgtacacatgtacccccagaactaatatttttaaaaaaataagaaacatttcctcccagagacagtgtcctaatgtggttttatcagagtcggttcttcctggtgggagataataaataatggcatcttatccagaagacttcatcaagtacctgaagtttactctgggaacatctgggctgtagcccctccttccaaggagctctgggatcaacttctgatactgagaagcgtgaagttcgaattcaactttagccttgttatgcttgtgtgtgcactttcacacttattgttaagggattcgtgagtggctgaggagaggagacacagaagactccctttctttgtaatgtgcaaaaaaccatagagaatcagtaaatgcagatgaatgggaatataaagcacttactgttcttatggttcaaaggttttagaacaggcacatccacctttactcagccacaaccaagaagactggaattcagaagcacactcgacctctaagcctgcctttctcatcatgctgtctcacacttctccctggataaataaaggcgacctgtgccctagcattgataatgatgctggggacaaagtcaagctccgacagtgttgggacagtctctggagtctgcctgggccctggcgcctgaaatggcctggctggtccttaggccgggccaccttgcctgcctgttttctggtttctttccctcctgggccatctgtttttcacctgcctgatggctgcagtctgctttccatctggtcatcgttccaaaaacatgggaagcagaatatgacaaatggtgataaatggaaagaaaggagtcacagaggtttcagcgttgatcatccacagatttaccagccattataaaatttggctcctgcttattcattttcatctgcatgccaaaagcaatcgattgtagaaaagacccgcattctttgtctattttacttgccaagtcagttggagtccagatggtgacactgacctttgcagagttcctcattcttcccaggaaatgtacattcgaggaaaagtcaagcctcttaccactttagtggtaccattaagagggtggttggggaacctggattattttaaatgcatacacgcacacacaccaagcctggaacatgctgcttgctcttatcatcaagagtgttataattttgggctggctggaaagcaaaagctccaagttagaaagcaatctgttccacccctgccccctcaccctccctgaagccagacggctgtagtgcagctttctcctcttcagacacacaccgggttggagcctgttaaattgcatcggcactgactggacctcacagaggcccatgttctatgcccctccgggaaccctcattggcttttggatactttccttgctactccgagttcgccaaatgctgtgatagacccttgtaaggtcacaagagtgcaacaatgagagaaaaaaaaagctgtgattctaaaactgaaccacactcctacattatcaggatttttccattttccagtgagagtggaatagagaagactttctgccctggagcctggttcctttccatggatcttaacaacagggggaaatagtagaccctgcacctgcaggaggaggagggtctggggaaagacaaagctgggattaacctcatgctactagttataaagaatgatttggaaggatcagtatcacccaaattagctatttgccaaacactgaatatctatcaactgataaccaccctcttattattgaaataattttgttttcataaatccagttctaattcaagaagatgccgtttcatgtgaactccatcagattacagctctccaggcacaaggggtcgctggcttagaatcaaagcacatgtccagatttcctcctcctcacttttcttcttggttgtttatagatgcgaaattctctttccttgcttctccattctgtggctttagggatttagaagaacaagagctaaatccttactttgtgtcagggtccgtaacaaaggcttcacacgtcttaacatgttgagtcctcagagcaaaggcatggagagggatatactattatcatccccattttacatatgaggacatcagggcacagataggttaacttgcccaaggtcacaggctagtatgtgtgggtttgaaccaaggccatggagctccaggatttgtgctcctaaacatgttgctgtggtcccccttagaatgtagagcaagagttctcagctgggggtgattttgcatttggcaggggccctctactttagcactgtctggagacattgttgattgtcacaggtggagaagcactcctggaatctcgtgagtggaggccaggctggagatgctgctaaacatcctctaatgtacagggcagctcccctcagcatagaactctcctccctcaagtatcaataatgctgacattgaaaaaaaccccgatgaaaagaaatcaccggacacatacacagaaatgtacacagatgtataaatagtaaatcaatcaatcaatctatctctgttgatccacctatctagctagctacctatgtcttccttctgctcccagaagacagctaaaaggtttactcttttgaaagggcctttaaagtattcactattttgaaagcttttagtagtaattttcatataagagttatagagtaaagtgatttacaagttattgttccttgaaaatatagtggtgtgtgtgtgtagtagggatggctcccactttagttcctgtggactttccctttggctgtggaaagtccaggtcattccctaagaccttgtacctgtgatttttgtctccacttggcctttgagaaaaaagctgggccaggacaggtcatctggccaaggccaagttctcagtcattttaattctaattacatccagcttacattacacattatgttaatatcacactccatcatgttacagcaatatacattatgtaatatattaatagacattacctattctgttattagcacatgacattaatacaccttatattaacacacattaaatattacatcaatacacattacatgctacattgacagcacattacaaattacattaataacacattgcaaattacactaatgcatactacatatcacagtgatgcacactacctatcacattagtaacaccttccatattacatgattaacacattacatcttatatttatacacattatatattacattcataatgcactcgatattacataacacattacatataatgtaattatatggaatatatgattaacacattacatattgcattaatgcacattacacattatattaatatgtacatcctgatgcctggttgaaggaagctcattctttctggagtccccaactctaatattcctggtcacctccagtcctagttgtcacctgcagctgatctagacaacgctggtttctcaaagagctgacagttcccccaagggcagctccctcccaggcaagcacaggccccttggctgcctgggaagttctccatgttcttcaccctagcttgcttcacggcccacagacatcccctttgtgctgtgcttacccagtggggtcctggtcctttggggtcacccccacagctgctctactacagcctacatggctgaccagggagacaggtgaagcgatgtcagtgcttgacaactcacacggcccagcgagccattcctcaatgctgatcagttcccacaagtaacaggctctggctgagtgaaggagatggtgcaggtgcaggtcaagacagggtcactgcccttctggagcttgggtctagcaggagagcggagtagaggtaagactttaattaaaagacccattgataacttggaattaagggtgatgtgctgttatatctagctgtgaggaaaaagatcatttggtttcagttcttagacctgggtgctgggcttggggaagcttgtccaactcttctttccctccaggtgagttctgtcttgaggcctctctttcatttgttccccctgctctgtggtttctaggtgcattgcccatccttcagagagctctgtgtgaatccataaaaggtgcttaaagcttttcactccatgaagcctcatctgtctcatgaaagcaataaatgtaagtggacatttgggaggaaatgtttgctttgcatgctcataactggatggctcatttggatggagattgccccagacatccatgtaagtcctccatcctagtagacagcaaactactgcagcacgaaccatattacattactaacacactacaaattatactgatacacactacatatcacaataattcacattacatattacattagtaacatcctccatattacatgattaactcattacaccttatatgagctggtttgtgctgctccctatgtaagcaccctctgtaattccatcaggatctcaaaggtctggagctcaggttcagccacagtacctgcaatgcaatgaaattaatggtattatgatagtaatgatatgataatattaatgcaggctgttgtgcagtacacctactaaggttctgggaaatagaatccacaagacatgatatacaccttatccttccttttcctccaaaacactgccacgatctatcaacaccatcatttaacagatgttgaaagaaagactctaaaaaataacttgcccaaggccagtcagtgagttggctgcaaactctctgtctttccccatttcttccttttctctattccacgtagtatttaagtcatcacctcctgttcaccccacagtgctcagctctgccacccctcactcactggagcaccagtgctcaggtcacccactatgcctaccttgcacatcccacctctggctgcacccacaggctcacgctaggcagggaagggcaggtaagggcatcaggcattgtgcccttccatagccaggctcatggagggctttctgagcagagattctaattctgccagctgacctggtagaagcccccaggctgcagccctgttctgcccacttccactcccatgcatagggacatccacaacatccacactccaggtaactgaatccacctccccactgcagcatttcagaagatgctaagtgcaggatgaaccacacacttccttctccaaactgggccacttttgagagtaaaagaggcattattaataactgagacaacaggtggatgctggacatatgtcattcaccctgtttgacaaactcctgtcgcctctcaccagcagaggaggctgtgagaccagaagacttggaaggaagtggcaggcactgattgtttctaagggagctgggttggatcctcgttttgtgtggttgggaggctggcagctggcagtcccctcaagccaagcatgatgtagtgggggtaggttatctttcttctcactgccttagtgtcctcaggattgccttggggccacttttcttgtcatcaggaagtgagcaggaccacagctgatgaccctcagcctgtcattttggtgcaatccagggtttaactggccggggagtaaaggggactgttgcaccattccaggctggctgagccttgtatctcacctccccacatctctgtatccctggggctaaatggggctgtttccatgctccttctagaagcttctccagcaccagccttcccccaaaccagaacaagagcattgatctacacccaagaggagcaggaatcagcagaaacacaatggaacaaactgatatgccatctagtggaaacacagaaagcctcaaatgaaaatctcagccaaaatgaggccactcaaccagtgtccagtgaatcaagtttctgacaaaagtcagctaaatcaaacacctctgtgtttcaccctttttgatggcaacgccttaaatgtgactgctgctcagaaagccaagtaaagaaaatataatggggctgctattggctcattccgaatcaggcattttctctcaggtcagcatttgggatcagaattttgattacataatattgtcgaaggcaacagaaaaggaccattgactcacagggtgttacagctgataaaggacttcagaattaatcaacaaacattgaggcaacattaactaaaggtcaagaactattctaaccaccttataaatatttattcacttaattctcacagcagccctatatataagcactagcattatctccacttgacagataaggaaactgaggcatgaaaaagttaagaaaggtgctcagggacacacagctgataaggcttcgcacccgtttggttaggctcggaagccactgcaccatgcccaaggtcacagagcaaggagtccaagcagtatttcccttactcagagatatgaatagccagaaacacttaggatgtttggttttacaacccacaacctcctcccccaccttcgccaaaagataaactattttctttttttctggaacttacctaacataacataatctacataaatctacaaaataatgttgttcatgagaaaggcatattcgattcaagcttatccaccttaaactgcttctgcataaccaacctagacgtatacagagtcccttctgttagttcctttgatggatttttgctttttttctcctgaaagtaaaaagcaggaacatatactgtgatttattaggttttgcatctgtgacaaggaatgcagtcctagagagggcggtaattagctaatgcttctggaatgctgcttccttcccaccagcccctggaggtcagcaggccaggggcgaaggcagctttgtcctgcccctatgggaggttgtgtttctcgacccagtgtcttgagtttgcttcggggccggcatctatggagagcagggagcatttgcactccttggggaagaggcatgaggaggggcagcggtgtcctaagctcctagtgactcagtctattcttgacctgccatcacagggatgagtttggcctgaatgaaagtcacacaccctgagcaggctctgaggtttggtttagtccacagtttttcaacctcaggactattgacgttttgtcgtggggctactggatgcactgtgaaatgttaacagcatccctgaccctccaccactagatgccagtaatggctgtaaccgtaataggttcgctgcctgatgggcagccagcaagtcagtacaccgagacagccagttgcagcagagaaagagggttcattgcagagccgctgaataagacgggaggaaacctcaaatttgtctccccgaggagttttagggttagggtttttaagggttttagagttgaccaaagtgtggagatcagtggttgatcgaagagtgcagggtgaaggcattggacaagaagatgaagacgctgtattctcatactgattcagttcctctgtgaggtgagggtcttctaactggttggtgtgagctgttccactggaattcaggatctgaaaagcatcttaagcaattttttttttttttttttgagacagagtctcactctgtcatccaggctagagtgcagtggtgcgatctcggctccctgcaagttccacctcccgggttgacgccattctcctgcttcagcctcccgagtagctgggactacaggcgcccaccaccacgcccagctaattttttgtatttttactagagacggggtttcactgtgttagccaggatggtctcgatctcctgacttcatgatcagcccgcctcggcctcccaaagtgctgggattacaggcgtgagccactgcgcctggccacatcttaagcaatttttaagcaaaagccttgtgattctaacctcagagatgctatctataagaacaacagggatacagatggtcagtgtctaggcctacctgactttctgttacaaggaagtgggccgaagtgcagcctgattaatgcttaattataactatatttctgtacagaattcttgttaagaattattgggtccaggattgacctaattttcccaaattatttaagattaattataacatggcctctcagattggttcaagggtagagtgagggggaccatgccatttgggaagagccattcagacatgtctaataagtaagcattgcttttctctaccttactcaatattctttacagatttcagaaacagcctaaaacaacattccacacattgaatgcatatactagttcacagtgaggccctagagtactggaagcaaagctgggaaaaattaaaattctaaatcttctacacagtaaatgcaaacatgaactggacattcctcatttcttccatatttccttttctaccatctttagcctattctcagcctcagatggactgacgcattaaagctccagagtgtgggtaatttatggaacttgaaaaatgcatgtctgggagccatggagagagggggaaagggcagtcccaatcagaccctcagtctcctctttgtctttcatgtactctctaatgtctactccattgagtgtactcttggtacccaactcctttaatgggagaagctttcagctgttgctcagggtattgctgctcatatgcactaaagccattgagcacactattcaggggaccctcaccagccctcttggatatttgcactattggtggtcctgaggtgacctcaaggatgagtcataggagttagtcaatctttcaaagggagtgtctgttccctctgctgggagatcgtgtgttatttgatgcaaattttcaatacaaacccactttaaatacagaagacatcccagatggaaaggaaaaaccttttcagacagctattcttcaatttggtttctggaggcataattttcttcgatggtaggcagaattctaagatgacttgtgccttgaataatcccttcctcttgagtaggggcaagagctgtggatatgatgggatctcactttgtgttataatgtatggcaaaagggacttctgcagatgcaattaaggtctcttaacagatgagttaaggtaaagggagactgccccggttgggccttatctaatcaggtgaattcttatggtcttaaagtctgagacagaagtcagagagaggcatgttcctgctggcctggaagaagaaagcagccacagtagctagaaccaaagagtggtctgagagctgaaagcagcctcagcccaggagccagcaagaaaatggggacctcagtgctacaatcagaaggaactgaattctgccagcaaccagagagctggaagagggccctaagcctcagatgaccttccagccctggctcaataacttatgttgttttaagtcactaggtctatacgtaatttgttatctggcaatagaaaatcaatgcaccttcattttattttgttgctaaattggatattcactgtattttcttatttgctttgttcttgatgctctggcatctagggccttgttgacaggaggaaaccacccttcccaaggctttactatcccaaagattgtaaaggacttgccctggagcatgcttttcatatgaaaactaaccaatccagaggccttactttgaaccaccttctctctctggctcttacactccaggaggtaatgttcctctgctctgatcatctcaggaccaggtaccagacagctagagacagcccctataccctggagcctatcaaaattacttaatctagcagatcatacacctacctagtctgtttaccctgcctcacctgttccttcccatgaaaaccacaataaagatgtctgcctctgctttccccatttccccactctgcttccttataaactttggtccttccatttgtagcccctcctcttgggaactgtgaataacaaactatcttgtcagtaacagtcatcgtctgatttgttggcctcaccatactggaataataataaaacctatttaaaacaaactgttaggatcgttttgcttatacatttcttctctatgtgttctactcagatcctcccaaacttcagaagtgtcaaaaaatactaaatgcagattattaaatcttgaccttaattaggttccattgtgaattttttaaataaaaagattgttttagtattaaaaaaattcttcacaagggataacaagcacatcttggcttttgtcccttcttacagatttttagcataagctgaaagaaaaataaaactatgggaaagattttgccagacaaaacagaacaataggcagagttccatgtaaaatgcctgattggtgcaggcagccagtatcctctaatggaaaaattcacaaatgtaacaaaaataaatggtgcatcatacattatgtttgtcaatacttttgtgatgatttatgctagaatggcaagccagagattgcctaattttatgtcctatgctttaagaccagcctcccatactttcctgaacgtctgaagagcttacaaaagggcttttgctttgttttactcaaagaaaagtgaactccttctcttactaatgatttgagcattttcctctcaggaaacaaataatatttaagcaagtgatttagcatgacactattttttgcttctaatgtaaaaggcctattacttacaaagaaaaactagatatttataaataaattattttgttaataatgtgctgttcctttacacatcttattatcttgtattaatagctctagccatactgacatttttagttttatctatacatgatattttctctaagaggcagattttagaggccagtcaagcatttggatataattttgtgcaaggattttttttaatttacaaataatggtatcacatacctgagcatctgcaaataaattggtaactgctatagttacaaataaacacacactcatgtatgcacacacaaccatgatcataaacatatccctgtgcctctcccttttctatgcacacctcatacatatagggggtatgtatgtgtatacctgtgtgtgtgtgcgtgcatgtttttaatactaaaacaatctttttatttaaaaaatttgcaatggaacctaattaaggccaagatttaataatctgcatttagtattttttgacacttctgaagtttgggaggatctgagtagaacacatagagaagaaatgtataagcaaaatgaccctaacagtttgttttaaataggttttattatgtttgtgtgtgatactcttatcaactaattgggcagtagattttgtattatggcaaacatatcactttagaatttgacatgcctgtgactgacacccacactacagcatacttacttcatcattgtaactttggatattttaacatatttggatgttcatttatttttacaacaggaagaataattcctatctcaccaagttactaagacggttaaatatggctccacctgcctgaaatcctttttctcctgaccatccacactgatgtcttcttgtcctttgaatgtcgctcactgttgtagaaagggtaaccctgactaattagctaacatagccatctaatgactgttatatctcttgattcatagcacttgtttatgtctgctttgatcatattcatttcattaaatatatatcttactccctctgtaagagaacaaatgctgtgagaacaggaccttgtttgacatgttcattattctagcatccagtgcctgaaaacatgcctgacacatagtagtcacttgatcaatatttgtatgaaggaaagaaggaaggaagaaaggaataaaaggaagaagaggggtttggtgggagggagaaagggagggaaggacaaaggagtgtgaaaaagagggatgaagggaggcaggaagaagtttaaatgtccaacacaatgactaacacattacataggcactcaatatacttcaattttctattttgtaatctgtgaattttggtaagtttcttaaactctttaggcctcgcttatcttatctgtaataatggtacatgcagtaccatccattaggattgttataaggaataaatggaaaacaaagaaataaatgcagagtatattgcactgtgcagaactatatactcattaaatattacatattaatatttttgttacttcccccaaatgatatcatcggacacaaacttctgagttcaattagaatttataacttacggatatgaatttgttcaaatagtgttatatttccttttataaaaataaccatttgagatatatgaaacttgaactcttggcctcaagtggttctcctgcctcagcctcccaaaatgctgaaattacaggcatgagccactatgcctggccatttgtgatgtaattaataagcaatcaaggaaatacttaactgtacttataattattaagttaatgtgaccaaagttaaactttaatacaaggaatgtgtgagcccttaactaaaaattataatccctctgcttgtttgatggctgaatcaaataaaccataagaaaaccactagaaaattatacttgttttcaatacatccttatacttctgaatagataaagaagccaccttaagtttttattaagaacagtttttctaaccgcaaacaagaataaaacaataaggtaaaatgccaccagaaaatgaaaacgtgagtaatgactttcttttcattgcctgatgggtatagagggttattttttcccgtacagcatagtttaattttttttcatttcttataatgaaattactgaggtactttaatgaagatttcctgcaaaatagattaaaacttacaaagtgatacaagatttgtgctttcagccagaaattgtcttttaattggccagtacaaagacaagagaagctaagggaaatggaataccatttgtgtcatttccatcacaccatttcttattctcagcacttactgagtgtgtaactgctgagagatttgccaggtgttcactcacagattgatagctccatgtataattccaaatgatagagatggagtgttgtgtcctctgatagcagaagcagcagccactgccttccccacaaacctgtcacaaagaaatcagtggggattggattttgccctgacctggataaaaggacacttcatcacagcaacagcctgctgggagaggagggaatagaccctgctcttgctgctgcagatgcctgcaaaggatctttacttggaggggtcttggagctcctttctccgcagctacaccaagtggccaggtatatgtgcacatatacagtagccacctgctttcactgttgcatgttacgcaatgaatctcaccatgggagtgaagatgcttctggttcttcaaagtgagacaggaagaggaagaagaagaagaggaggaagaggaggaagaagaggaagaagaaggaggaggaggagggaagagaagaagaaggaggacgaggaggaggaggaggcggtggcagtggcggtggaggaggaggagggggaggaggagggggaggagggggaggaggagggggtggaggaggaagaagaaggaagaagaggaaggaagaagaagaaagaagaagaaagaagaaggaagaagaagaagaaagaagaaggaagaagaagaaagaagaagaagaacactgtttggtgggagctatattccaggctccatagctggttactccaagtgaagaaaatgcggcttcaagaggttgtgaggcttacgtggcaggatgagggaagtgagggtatgggcatttatgtgatgtagcagcagcagcttgtcccagtgggaaaacctcaccctgagaggtcatgggaaatcccgagaaccacatagcacttcccatcctccatctttcctttcagtacagttccccacaatctctactaccacccccaccctctgcaccaggctcttatctacgttttttggaaagaagaccatcagttcaacaaatgagcataaaacaagactctcacagctggagcctctcccacagtttgcgctttctcctgagagactctttgatctctcctgccattgtcttggggccatcccagtggttcttcagacatgcctgaatatgtctacattccaccagcaaatgcccagactgagggtcacacacctacccacacagacacaaaaataatctcactcatcaacagtggtgcactaagtctaaggttacaaggaacagtgacacacaggaagtgtgctgtcagataagagagttatacacttcaagggacaaccaaagtggactctgatgaggacctgcatggaagggtcctggtgtctgtgcgtgaacactggagggacacttaggtctgtgaggcctcaggaaaggcttctgaaagcaagaggccctgaactgaaacagctaggtgtctaagtgttctgtggctgaaggcaagaagcaaggacaatctaggtacagggaagctgacaagggaaggctcagaggcagaaaatacttgggtgaatccagagcccccatctcgcttaatatgagaaaaacctagaatcccatgcagggagtggcaagaaaccaagctgcagtatcagcagagactgagtcataaagggcactgagggacatagcaggaagctcagattttgaactgacagaaaaaaagagtccctgatagactcaagtttctctctcagattgatagcttcatttataaacccaatgatagaaatggagtattgtctttgaataataggagctatcacgattatactgtagagcttttggaaggctaccctggaggcagtgtaacagaaggtcagaaattaagagggtcacctgatgaggctactgcaatagtccaaggggatgatggtttgggcctggactaaactatggcaagtagggatggggagtagataccaagaggagagtagcaggtagcagggccagatgacggcctaaatcgaggggtacaagagagcttgcacgaaataaacaatcagccctggcaggactgactgggactgcccttgcaggacgaagagaggaagggttaaaactacatgtcttgaggctatttgccaatgtccttaggaagcagggagtatggctaatggagcttttagtcctaattagccaaaactgggatcctgccaattttagaggctttcaaggggcatgcttcaaggaagagtccccctgagcttaagtaatgagtgatggcctgccatccagcccaggggcaatgtctctaaccctgggtcatgccagaattatactcccttgactaaacacatcagtttatccaggacccaacatatttcattttatttaatattcccccaaaccccaagtagatgtacttactactcatttcacagataaggaaacaagcttcaggagaagcaaggccatttttcacatagttggtaagcattcaaaacagtattcgaatgctggcctgtctgattcctgggttttattctatccactatgtacaatatcagaggggtccatgtgtttctcttctggacagagaaaagagtgaggagacctcaacagtggacactagcctccacaattcagaatgaagtaacctgggacttgcagaagagggaatccacattgtttcagttaggtagcatttggtgacagtgataacaatgataatgaaaacagcagcaactaatatttactgagtgcttcatatgcactagacattgctctaactcatgtaatccacccaaaaacctacagaaataggtattgtcatgatgtccagattgttgagtgaaataattttacagatgaggaaatgggcccaggagaattaaataactcttccaattgacaaggtagaggtggaaacagcatggaaattcaggcatccagcttcagagctcactctcctaaccactatattatgttctctatggtcaggttgaacacagtagtttgcctcatgttcctttatggtttgtgaatgcggctgaaaagtcccacaatcactaaaagacaaaacacagtcaagctttttattcttccttcaaaaaaaaaaagttgatgggaaagggtgatagtacacacatagggtccggcaataaatcattttttccctcccgtttcacagtgaagggcataggaatgaaatgagcttttagaattcctgagaatcataggcactccaccctaaccacagatgctggaagctgcattatgatatgtattacattcaaatgtgggaacccagggctaattttaagcaacagttcaagctggatgtaattaaaacctgcagcattctacttctggaaatgactaagaagcttgtatcgtactaatcctctcacaggtgacaattgtaaactatagccaagtttaaaacattatttgaaggcactgaagaaggaagaaatgcaggctgaatgtggaatagagtcagccttcaacaaagaaaactgcactgtatgtaaatggattttgcagggtgtttcacctgagaacacagccctgtctgcacaagatgaagtggctgagctcctgcagaaatatgcagtcttccttgtttgagaagtcagagtatggagttcataactggaaaaacttctggggtgtgaggtgggtaggaatgccaaaaaggaggatgtcaaggaggggggatcccccaaatctgtgtgcagactttgccccagttcctggctgactacacacgcataaactgcgcatgcatgtggaaaatgtcaagggtcctagaaggaggcagcagatggaggacagagggaattgagaggagatatcaactgcagtcccccacagacaggcagccaacttcaccaccctctaaggcagaactcaacactctgaccaagtctctaaaacaaaacatttacaaagcccatagtaaaataaaatattggtagacatgtgaagaaatagaaaaatgggactcaaaaaaagaaaagcagtcattagcaaccacttctaaagagaccaaaagtttggagttatgagagaaggagtgcacagcacctatgaagagtatatgcaaagatataaaggaacacggggtcatggtgagggtcaactgggaatcctggcaggagaaaataaatatatatacataaagaaataattatagaactaaaaatcaaaatgtctgagatgaaaaattcaattattttccttaagagcagattggagaaagcagaataatagacagagacaaatagaaagcaagtaagaacttgatagacatgaacctaatgatataattcattacataaatgtagatggagtaaacatttaaactaaaaggtataaatgatcagactgtacaaaaatataagactaaactatatgctgtttttcttagtgatggttctctagaaaaacagagccaataggatgtgtgggtgtggatgttgaggagagagagagagagagagagaaaaagagagagagaaaaaaaagagagagagagagacttatttaaagaaattggctcatgttaccttggaacctggcaagtctaaaatccgcatagtaggccagcaggctggagacccaggaagaattaatgttgcagctctggttcaaaagcagatggcaggtagaattccttcttccttgggtggggaacttccatctttttctcttaaggccttcaactgataagaggatgcccacccacattatagaagataaactgctttacttaacgtcccctgatttcaatgttaatctcacccaaaaactgtcttcacagcaacatccagtctagtgtttgaccaaatatctgggtgccatgaccttgcaaagtttatgttaaagcataaaattacagaacctttttatccccttatagtcttggctcatctttatgtttttgaatctcataactgcttctgtttgatcacagcttgattcactgatcttattgcatggaggcattgccttcttttattctattgagaatggaaaattgtttccaaaataatttatttctggcttttctataaatcattttgaaaagtctctgtgcttctctgagtcttcagggatactgattctttcaactttttgaatcttttgttcaaatcaggactgtattgatctttttcttttagattcattcttcacaaaagaaacatttatctagacttgacaaaagcctagagaaaaatgtgttaattgccctttcatagttgattagattactggttatattggtcaaggctcatagtggaagaaagtagaatgcactctatttgatctgaaaagaaagtgatgtatcagatggaatgatgaaccttacagaatctcagtgaggcccagggcataaggtttaattatcacataatcaaaaatacagcaatcaaaggaaatgcccaaccacctatggaactgtttctgttgctgctgcctactgctcagtacctaagtttctaggaatcagacttcagaaactgccagacctgcaacgggagaatgaacgtttctgtcacgaaccatggccactggctcccattgttcacaccctcctggtctcatgtggacatctgcttggcagaatctaagccacatgcaaaatcttctctgctaagtacggtttttagtctcctggcatctgttatactagaaggttcagtagaaggaagtgggaatggcagcggagtgagccagtgaaaaatctgctgcactaaacaatctcagtgctggatggaatacccacatctcaaatccaaggtctagaagacctttatccatggtggcttcactgtaaatgagtggacctctcatcatgtcactgattttctgggactctatactaaagaaagattttttaaaaattgcaattccttcttatatcaactccagggctcctccttcctgcatcttcctccacaaagctttattttcttaaatgaaatgtgtcaccagcaattctctccccaaaccttccacaccacaactcaccatactcactagatttttgagaatcttagtcttgagtgaaaatacaagtgtgtggggaaaaaaaggagaagtagattctgaccaccaacacagtagaagacgagccacatggtttccaggctggcacagatcctgggtacatgagctgggaacagacttgatgcagggataattttgggtaaattaattgacctgtttaaggatatttggaataagttacctataagcagaattctagaggtaatgtcctatgattttataaaatctggaagtcactcatttacatattggaaattctttttcttgacaaaaatgattcatgacttcaacaaatggtgctagaacaactggatgtctatgttcaaaagaatggtggagtaccccttcttcactccacacatcaaaaccatctcattgttcaattcccacctatgagtgagaacatgcagtgtttggttttttgtccttgtgatagtttgctgagaatgatggtttccagcttcatccatgtccctacaaaggacatgaactcatcattttttatggctgcatagtattccgtggtgtatatgtgccacattttcttaatccagtctacacctgggactgttgtggggtggggggaggggggagggatagcattaggagatatacctaatgctaaatgatgagttaatgggtgcagcacaccaacatggcacatgtatacatatgtaataaacctgcacgttgtgcacatgtaccctaaaacttaaagtataataataaaaaaatctctgaaaatatacccaagacctagatgtaaaaattaaaactataaaacttttagaagaaaacataagagtaaatatttgtgattttgagttaggcaatagctttttaagatacaacaccaaaaacacaagggaaaaacaaaacaaaacaaaacaaaacaaaatccgtgaattgaacttcaccaaaactaaatgggacaacatatttaaaaatcacatatctgataagggacttgtatccagaatgtataaatgataccacttgcaactcagcaataaaaagacaacccaattaaaagcagacaaataatttgaacagacattactacaaaaaagaaatactaatgatcaataagcacatgaaagatgttcaacatcattagtctttcaggaaatggaaaccacaagacatcactttacacccactagaatagctcaaaaagaaaaggcagacaataataaatgttgtcaaggatatggtgaaattggaactctcattcattgctaatgggagtaaaagagtgcagtcaatttggaaaacagtttgggagttcttccaaaagttaaacatagagttaccatataattcagcaattctcctccaagaatactaaaaacatgtgtccacacaaaaattcacacattaatgttcatagtagcattattcataatagcaaataagtggaaacagcccaaatatccatcaactgataaatggataaataaaatgtggtatatttattaactgaaatattatttagcaataaaaagaaatgaagtactgattcatgttgagcatcagtgaatcttgaaaacatgatgctaagtgaaaagagccagtcacaaaagaccacatatcacatgattcaatttatattaagtgtccaaaataggtaaatctatagagatagaaatcagatttatgcttgacaagggattgtggaggagggggcaatgggaagtggctaccaataggtgtggtgtttctttttggggtaatgaaaatgttataaaattagataatgttggtaattgtacaactttgtgaatatactcaaaatcactgactcatacactttaaaaaggtgaatttcatggtgtgttagttatatctcaaaaaggctattagagatttactggaatttcacaaaaataattgcttatttaatgcaagtttattcatgatattcacattatttgaagtatgaaagttcattgtttgaattaattaaaaattaaaacaacatatcaaaatgtgtgggatacagatttaaagaatctaaattttcattttaagatatagaaaatacaagcaaaagaaaattaaacccccaatagaaagaagacacaataaacataaaagtaaaaataaatgaaataaaaactaaaatataatgataatgatgatgataataataataatggtaataatagtaacatgaatgaatcctgcagctgtttttttttaaatgaataaaattgataaaactctcactagacttatgcagaaaaaaagaaagaagacacaaattaccacattaggagtaaaagaggagcatcactacagatcctatagactttaaaaggatcataggaaatattatgagctgctttattccaataacttcaacaacctaaatgaaatggataaatcctctgtcataatgttaccttgcttgtattggaatgtgtttattctcaggagacccatgcagaaatattagataaagtgcaactcactttcaaatggctcagcaaaatgtcaacagttgttgaaactaagtagtgaatataaaaatgtttattatgttattcttttattttaccttttctgtatttttgaaaatttttgtaatgcaaaattgggagaaataaatcaggtatgaatgcatgttagtagagaggctttcactccgggttagtcatttcaagtagggctgattatggaaaggacaatgtcatgaccttttcacccaaaaagcagtgttgtaaccttccttttgtgtctggatgaagcttcttggtgacactggtaggctatggaaactcccacagaacaagcacagaaaaactcacacagacatgaaaccttggcctaaggggacacttattggacactaattacccttaagagctctgttaacccaaacttcccataaaccaagcttggtatgaaataagaaaatgcataaggaagcaaaatgctgacatgaccaaatttatcagtcctgaaagtcctttcttcagaagtgatgttgcaattgtacaataataaacaatagaaggttgacaatctcatgtttgcaggcagagaacagcttccctacatttctaagaagctgtatatttggaaatggattaaattgaaggtagggataattggcattctaaagccaagtaggatgaaacaagcagaattttccatattttaatatgtctctttttaattagagtatctataaaggaaacaaattattgtatagttaccgattctttttaatgaacaaggaaaaatggtctaataatatgagcttccttttggacttgggtcctggctgatgttgggtatccaaggaccctcgctgtctttttttccatgttggacgggtaatgtgcccacattgtaacaaggtttgaggaaggcacatctcacacatgcacatgtgaacacccaagcatcacgcttatgaactacaaaaggatctaccctctccatcttaagtagagacttgagagggagtgataggcaggaagagcatcaaaacttcttcacaggacataattgaatgacttgttacttattttcttatggttcatttattcaacaaatgaaacatctcaattgttcattgctattatagatagacactaggtatactggtaaaaaaaaaaagactaaaaaatgttgtttttatttaacttgcatgatggctgatatagtaaagtcaaaattatttaaataaagaaaaggggtaatgaagactttggatgtagaaatctaggttctcatccaagctttgctgctagcttgctgagggaaccctgagtaatgagtccttaaactccctctaggcctggaggttcatccatcaagtgaggggccttaaccatgtttccaacaacagcctttccggccccatcttcctatgaaggagaaacctcagtatggcctcgtggggaacatcgtggactttggactaaagcacttttggtttgttcaattatttcatctctgatcttcatcatcttatttaactactctgagcctcaatttccttgctgcaaaatgaggtgatgtttgcttaaatgagcaagcaaagcaatcaccacagctcctggcatgccatagcacatggcttttgctcccttggggtgcttacatatgaagaaaggttttgcaatctaaagacagtaatcattttggtagtgagccagctaattgaggaggcaatttctcctccatcagactatcagctgatgtgcaacctaaaaagcatttgttgaataatgtaaaaggagtttttaccagctccttcaattttgaccatctttggactggaagatttcattcaattcaaaaaattcccaatgacatatacattgtgaacactaagattatattctttctggaagctgtgtccattccaacaagtcaggaccatttttacccaacctgtcctaggcagcaagactcctcaagagatacatgcagaggcagagttttctaagctgggctgccacatggtcaccctggggagaaaatggcagaagacagctttcttgggcccacctatcagaaggaagctcctgtggcaacagtgatctcatctcttaggggcccatggtagaaatattgaaagcaaaagctataggaatggtccaatataacaatcacagtttccttcaattttcagaaaattataaatgattaagaatacaaaatggttttgatttgcatttctctgatggccagtgatgatgagcattttttcatgtgttttttggctgcataaatgtcttcttttgagaagtgtctgttcatgtccttcgcccactttttgatggggttgtttgtttttttcttgtaaatttgtttgagttcattgtagattctggatattagccctttgtcagatgagtaggttgcgaaaattttctcccattttgtaggttgcctgttcactctgatggtagtttcttttgctgtgcagaagctctttagtttaattagatcccatttgtcaattttgtcttttgttgccattgcttttggtgttttggacatgaagtccttgcccatgcctatgtcctgaatggtaatgcctaagtttccttctagggtttttatggttttaggtctaacatttaagtctttaatccatcttgaattgatttttgtataagttgtaaggaagggatccagtttcagctttctacatatggctagccagttttcccagcaccatttattaaatagggaatcctttccccattgcttgtttttgtcaggtttgtcaaagatcagatagttgtagatatgcggcgttatttctgagggctctgttctgttccatagcacatatacaccatggaatactatgcagccataaaaaatgatgagttcatgtcctttgtagggacatggatgaaattggaaatcatcattctcagtaaactatcgcaagaacaaaaaaccaaacaccgcatattctcactcataggtgggaattgaacaatgagatcacatggacacaggaaggggaatatcacactctggggactgtggtggggtggggggaggggggagggatagcattgggagatatacctaatgctagatgacgagttagtgggtgcagcgcaccagcatggcacatgtatacatatgtaactaacctgcacaatgtgcacatgtaccctaaaacttaaagtataataaaaaaaaaattaaaaaaaaagaatacaaaatggattcaaaacttacagataacttgtaaaaatcaattttaaaagataacctaattttaaaatgttcagaagtcttgatcttgatcaggcatattacaatatagcatgggccactgatcaagtctccagcagccaaatccaccccctgccccagcctgtttcttataaataaatttcggtggaacacagcctagcctattcattcacacattgtccatggctgcttttgctcagcaacagcaaaactgaatagttaggacagaggccatatggcccgcaaagccaaagatatttactatcaggccccttagaaaatgatttgcttgtccctgaaatagaagctatccaagtgactgataggcatatgaaaaaacactccagcattaattgccaacagaaaaatgcaaattaaacccacagtaagataccattatccactcattagaatggcaaaaattaaaaacactgacaacatcaagtgttggcaatggtggagaacagtgggagctctcatacactgatggttgaagtggaaattggttcaattttggaaaacagtttggcagtatctactacagctaaacatttatgtctccatggctcagcaattcctggtcatattctcaagagatatgaggactgtggccaccaagagacatgtatgagaaaggtcctagcacctttatttataatagccccgaacataaaacaataaatgtctgtcaacagtatgatgaactaaataaattgtggtgtatgcgcacaatggaatagtatatggcaatgaaaaaatataagctgttgccccatgcaaggatgtttcacagacataatgttaatcagaagaaagcagatctcaaggagtccatgttgtatgattccatctatttgaagctcagtaacacatggtactagaagtcagaatagcaattacctctaggactggggattcatattgaaagagaatgaaggttgggaagcctgttggggcctgggaatgtcttagatgttgttctggcaggtggttgcaagcctgtagacatatgtaagaggttattggatggtacactgaagattgcagcacctaaccgtagaaggtacagtgttacatctcaatatagaagagaaaatattaaagaaaaaaagaccgtgggtccttttggacttgaaccttatgccacagtggtactacagagtcatgtcttaactggaactcaaattgtaatacctttaaagctttgtgttgaaaagaatgaacatttcagaatgtaattctgcatttgtgatgaagtcctcctcaataactgattcaaagctgaggagactgcagtttcccctaatgccctggccctgtctctgatgggtacatgtttgttgagacatctaccaaggggatcaatgccccaggctgatgtcactccctgtgcttgactcctgtgtctgggtggcaatcgagagccttcctgctcccccagcgagggacggacaggaggaagcaccctccaaaggctggcctgtgtcacagattgtccaggaggtgggcaacataagggatgaggtcatctcttggtgagcccatgcctggccttacagagcagtgacagatcacctgtcacccccgcaacaggcaagtggccccatgtccatgagccacagggtgccagggatgtgggattgtagctcccctgtgggtcccctcaatgaagggaattattcctccaaggagatttgggtcctctgctgctctcagacagtcagttgctttctgactcgtccacacaatggatactgcgtccaattgtatcacaccatcgtggacggctggagtcacatctaaaatgtccttgtacctccagcctccatcactgcacacctgtaactctgctcaccctaagtgcttaatgaacatggtggatgggctggtatacaaatgccttttgggggtggtttgacttacagccatctctgctctcactacagaaagaggagaggagcctcacagaggtaatgtcagtggaagaacctccaaccctcctttgaacacattcctaacaaagaaacctgcatgctttccccaccttttctcctacctgtcttgtgtcagagcagtgcctccctgctgctgatttagaaccaaccaacagctggacctgtttatatctagcaccttgcagtgttctacctagattccaaaaatgaactcaacaatgattcagtgtcattgatcaggttcataatgcttggatttgttcatacaagggctttccctagaaggttacttataaaatgaatatctaataggaggggtttaattattttgtgttgtttttcttactagccatatctccttaaaagtatagagagttgaaattagacatcatttttctttttatcaggctaactgaagtccaactttgaagttttgcaatgcttgtattttaaagtgtattggcatggccctgttagtttcctgtggctagtttactaaggagctaataaagaaacatagagattatgcttccataattataacttaatatggattttaataaaaatggattcctttatcattctctgaattttattttgtgcatttaaaatattatactgaggagtcgtatcagtttgcttgggctgctgtaacaaataccacagatggggtggcataaccaacagaaatttattttctcacagtggagactagaagtctgagataaaggtattggcagggttggtttctcctgaggcctctctccttggcttgtgagtgactgtctttttgatatgttctcacatggtcatccctctgtgtgtgtctgtgtcctaatctactcttcctataaggacagcggtcatattggattagggcctacccatatgaactcaatttaccttaatttcttctttcaaggctttgtctgcaaacatagtcacattctaaggtactggggcttaggacgtaaccccttttctttcttttttaaaattatttttatttttatttatttatttatttatttagagatggagtcccactatgtcacctaggctggagggcagtggtgcagtctctgctcactgcaacctccgcctccaaggttcaagtgattctccagcctcagcctcctgagtagatgggactacaggtatgcaccactgcatccggctaatttttttattttgaggggggggtatttttagtagagacagggtttcaccatgttggccaggctggtctcaaactcctgacctcaggagatccgtccgcctcagcctcccaaagtgctaggattacaggcgtgagccaccacgcgcagcctttttttttttttttttaactttcattttaggttcaggggtacatgtgcagatatgttatataggtaaactgtgtgtcacaggggtttggtgtacacataatgttgtcacctgggtaataagcatagtacccaataggttatctttcctgatcctcttcctcctcccaccctccacccacaagtcagccccagtgtgtgttgctcctctcctagtatccatgtgttctccttgtttagttcccccttataagtaagactaggcagcatttggttttctatttctgcattagttcacttagaattatggcctctagctccatccatgttgctgcaaaggacatgatctccttcttagttatggctgtgtagtattccatggtgtatatgtaccacattttctgtatccagtctatcactgatgtgcatttaagttgattccatgtctctgctcttgtgaatagtgctgcaatgaacatacacatgcatgtgtctttatggtagagtaatttacattcctttaggcatatacccagcaatgagattgctgggtcgaatggtaattctgttttaagttctttcaggaatcgctacactgctttccacagtggctgaactaatttacactcccaccagcagtgtataagtggttccttttttttttttttttttgcaacctcgccagaatctgttattttttgacattttaataatagccattctgactggtgtgagatggcatctaattttgatttgcattctctaatgattagtgatattgaactttttgtcatatgcttgttggccacatatgtgtcttcttttgaaaaatatctgttcatgtcctttgcccactttttaatgtggttttttttttcttgtaaatttgtttaagtttcttatagcttctggatgttagacttttgttggatgtgtgtccctgcccaaatttcatattgaaatctaatccccagtgttggaggtgggacctggtgggaggtaatcagatcatcagaatgaatttctcatgaatggtttagtatcatcttgttggtactgttctcacaatagtgagtgagttctcatgagatctggtcatttaaaagtgtatggcacctcccactcatgctcctgcttttgccatatgatatgcctactcacccttcagcttccaccataattgtaagtttcctgaggactatccaaaagccaagcagatgtcagcttcatgcttcctggacagcctgcataaacatgagctaattaaacctcttttctctgtaaattatcaagtctcaggtatttctttatagcaatgtgagaacagactaatacagatgcatagtttgcaaatattttctcccattctatgggtcatcttttttactctgttgatagtttattttgctaagaagctctagtttaattagaatccatttatcaatttttgtttttgatgttaccgcttttgggtttttttgttgaaatatttgcctggtcctatgtctagaatggtatttcttaggttatgttccagagtttttaatagttctaggttttacatttaagtatttaatctatcttgagttaatttttgtatatggtataaagaaggggtccaggttcaatcttctgcatatggctagccagttattccagcaccatttattcatggggaattttttccccattgtttgttcttggcaaatttgtcaaagatcagatggtatgtggctttatttctgggctctcttttgtgttccattggtcgatgtgtctgtttttgtaccactaccatgctgttttggttactatagcccagtagtatagtttgaagttgggtaatgagatatctccagctttattctttttgctcagtgttgccttggctatttgggctctttttttggttttgtataaattttaaaacagtttttttctaattctgtgaagaatgtcatttgtagtttgataggaatagccttgaatctgtaaattgctttgggcagtatggccattttaatgatattgagtcttcctatccatgagcatggaatgtttttccatttgtttgtgttatctttgattttttgagcagtgttttgtaattctcatagagatccttcacctccctagttagctgtattcctagatattttattctttttgtggcaattatgaaagggattgcattcctggtttggctttcagcttggattcagccccttttctacatgaatattggaggggacacaattaagctcttcatagtctttcgctttgtcccttctttgctgtgttgggatgtaacccagcaaagagtcaacaggggaaggccaccttccatctgtgtcctgtctttcatgcgtaggctcctctctgtgctctcccctccctcccaggtcacatgtaccctgacaaaagccttcccatagccttagtcatcctatgtttgatgggtacccataggagaatggtaggcggcaagaccctgaagccctgatttgggaaatgacctgcagtcttcagtgcagcacagttttaggagtgggcaccagctgtcagtgcacattccttctgttccctgagcagttccttacctctgtctttggtgtgaggcttcagactctgttggataagcagatgcccattaggggcagtgctttgaatagttcatttcaggatgttcaaattgtcagggacattttattacacacacacacaaacaactgtaagaggtggtatttttaagcacttcttaaatgccagacaccattctctaattttacatgttttactcagttaatcttcacaacactatgaggtacacaaatgaatgtgaatgaatgcaatgaaacacgcactttcagtcaaataaacccgagtgctggccattctccagattcattctttgcctgctctatgcccaggagactgactctggcctgcactgcccaggcccccttgcaggagactgcccatacaacagcagccaatgggaggacgagagcagaaagtagaggcagtttccccttttcccgtgacagagcctcactgggcccagacaatagcacttcctctctccttccttgaaacctgggggtgggaacaacttccccctattgctgtcatctgggagcctccccttcccttgtctgggcccttatccctgcccacagctcaggaaacttctgtcatcaaaggctcttcctctgcacaatttgggatgaactgtttcttagtgtattcttatcccatacattgagcaactctccttttatgtgtatataatttaggaaacttttgtgtaagtacaaaatgtgtgtgtacatatttttcttttctcccttttatttatttaaacaatgttaaaacaatctgtccctcttaattttacattttcctcaggtgctgaaataacaactaaaagttgcttgtatctgcattgtggtttctgtgtgtttgccatcaggggaaaacttctttgaataaaatttacataaatttaaacaacaaacactatcttaaacatcataacaaaggttttattttttttaatttttaatttaaattgaatttaattatttatataatttataaattttatatatatttattaatatatttatatatttttatttccataggttatttccataggtttttttttatttccatagattattgggcaacagatggtatttggttacatgagtaagttctttagtggtaatttgtgagattttggtgcgcccatcgcccgagcacccaatttgtggtcttttatccctcaccccttcccaccctttccccccaattccccaaagtccattgtgtcattcttacgccttcacatcctcacaacttagctcccacttatgagtgaaacatacgatgtttggttttccattcctgagctccttcacttagaataatagtctccaatctcatccaggtcattgtgaataccattaattattatacacaaacacacacacacatatacatatatcacagtttctttattcacccattgatttatgagcatttgggttggggttccacatttttgcaattgcgaattgtgctgctatacacatgcatgtgcaagtatctttttcatataataacttattttcctgcgggtagatacccagtgtgggattgctggatcgaatgatagttctactcttagttctttaagaaatctccacactgttttctatagtagttgtactagtttacattcccaccagcaatgtagaagtgttccctgttcaccacatccatgccaacatctattattttttgatattttgattatggtcattcttgcaggagtaaggtggtataacattgtggttttgatttgcattgccctgaccattagtaatgttgagaatttttccatatgtttgttggccatttgtacatcttcttttgagaattgtctattcatgtccttagcccactttttgatgagattgtgtttttttcttgataatttgtttgagttcatggtacattttagatattagtcctttgtcatatgtatagattatgaagatttttctcccactctgtgggttgtctgtttactctactgtctgttccttttgtgtacaaaagctctttagtttaattaagtcccagctgtttatctttgtttttattgcatttgcttttgggttctcgatcatgaaatccttgcctaagccaatgtctagatggggttttccaataccatcttccagaatttttatagtttcaggtcttagatttaagtccttgatccatcttgagctgatttttgtataagatgagagatgaggatccagtttgatccagtttcattatcctacatgcagctagccagttatcccagcaccatttgttaaataaagtgtcttttccccgctttatgtttttgtttcctttgttgaagattagttggctgtaagtatttgggtttatttctggtttctctattctgttccattgctctatgtgcctatttttataccagtatcatgctgttttggtgactatgaccttacactatgttttgaaatcaggtaatgtgatgcctccagatttattctttttgcttagtcttgctttggctatgtgggctcttttttggttccatattaattttagggtttttttttgtaattctttgaagaatgatggtggtattttgatgggaattgtgttaaatttgtagattgcttttggcagtatggtcatttttccaatattgattctactcatccatgagcattagatgtgtttccatttgtttatgtcatctatgatttttttcagcagtattttgtagtttcccttgtagaagtcttttacctccttgggtaggtatattcctaagtattttacttttttgcagctattgtaaaaggggttgagttcttgattttattctcaccttggttactgttggtgtatagaagacctactgatttctgtacattaattttgtatctggaaactttgctgaatgcttttgtcagttctaggagcattctggaggagtctttagagttttctaggtaaacaatcatatcataagcaaacagcaacagtttgacttcctccttcctctttacccatttggatgccctttatttctttctcttgtctaattgctctgtctagaacttccagtactatgttgaagaggagtgagagtgagcatccttgtcttgttccagttctcagagggaatgctttcaactttttccctttcagtattatgttaattgtgggtttgtcagagatggcttttattacattgaggtatgtcccttgtatgccaatttttctgagagttttaatcataaaaagatgttggattttgtctaatgctttttctgcatgtattaagataatcatgtgatttttgtttttgattctgtttatgtgatgttcacatttattgacttgcatatgttaaaccatccctacatgcctggtatacaacccacttgatcatggtggattttttttttttttttgatatgttgttggattcggttcactagtattttgctaaggattttagcatctatgttcatcaggaatattggtctgtagttttcttttttggttatgtcctttcctggttttggtaatagggtgatatcagcttcatagaataatttagggagggtttcctctttctctatattgtggaatagtgtcaataagattggtaccaattctttgaatgtctggtagaattctgctatgaatccatcagtcctggactttttgtttttggtaatttttaaattaccatttcaatttcactgcttgttattggtctcttcaaggtatctaattattcctgatttaagctaggaaggttgtatctttccaggaatttatccatctcctctaagttttctagtttatgtgtataaaggtgttcatagtagccttgaatgatcttttgtatttctgtggtgtcagctgtaatatctcccatttcatttctaattgggtttatttggattttctctcttcttttcttggttgatcttgctaatggtctatcaattttattttatcttttcaaaaaaccagctttttgtttcatttatcttttctattttgtgtttgtttgtttgtttcaattctatttagttctgctctggtcttggttatttcctttcctctgctgggtttgggtttggtttgttcttatttccctagttccttgagatgtgaccagattgtttgtttgtgctctttcagactttttgatgcaggcatttggggctatgaactttcctcttagcactgcctttgctgtatcccagaggctttagtaggttgtgtcactattgtcattcagttagaagactttttaaatttccaccttgatttcatttttgacccaatggtcactcaggagcagattatttaatttccatgtatttgcatggttttgaaggttccttttggagttgatttccagttttattccactgtggtctgagagagtgattgatataatttcaattatcttatatttattaaggcccattttgtggcctatcatatggtccatcttggagaagattccatgcgctgttaaatataatatatatcctgcagttgttgggtagaatattctgtaaataatcattgtttatttgctgaccttctgtcttggtgacctgtctagtgctgtcagtggaatattgaagtcccctactattattgtgttgctgtctatatcatttcttaggtctattagtaattgttttataaatttgggagctccagtgttaggtgcatatatatttagaactgtgatatttttctgttggacaaggtcttttaccattatataatatccctctttgtcttttttaactgctgttgctttaaagtttgttttgtctgacataagaatagctactcctgcttgcctttggtgcccatttgcatggaatgtctttttccacccctttaacttaagtttatgtgagtcctatgtgttaggtgtatctcttgaaggcagcagatggttggtgaattcttatccattctgcaattctgtatcttataagtggagcatttaggccatttacatttaacgttagtattgagatgtgtggtaccattccattcatcaggttgtttgtgcatgcataacttggttttctgtgtatgtgttttttttaattgtatttttgtttcataggtcctttgagatttacgctttaagaaagttctgttttgatgtgtttccaagatttgtttcaagatttagagctcctttgaacagttcttgtagtgctagcttgatagtggcaaattctctcagcatttgtttgtctgaaaaagactgtatctttccttcatttatgaagcttagtttcactagatacaaaattcctggctgataattgttttgtttgaggaggctgaagatagggccccaatcccttctagcttgtagggtttctgctgagaaatctgctgttaatgtgatcgttaatacagagtgacaacttgattgggttgaaggatgcaaagttttgatcctgggtgtgtctgtgagggtgttgccaaaggagattaacatttgagttagtgggctgggaaaggtagacccacccttaatctggatgagtaccatctaatcagctgccagtgcagctagaatataaagcagacagaaaaacataaaaagcctccactggcttagcctcccagcctccatctttctcctgtgctggatgcttcctgccctggaacatcagactccaagttcttcagctttgggactaggactggcttccttgctcctcagcttatagatggctattgtggaaccttgtgattgtgtgagttaatgttactgaataaattcccatactcatatatatctatatatctatatctatatctatctgtctatcatctatctatctagctagctagctagctatctgtctatctatctatctatctatctatctatctatctagctagctagctagctagctagctgtctatctatctatctatgtagctagctagctagctagctgtctatctatctatctatctatctatctagctagctagctagctatctatctatctatctatctagctagctatctatctagctatctacctatctatctatctatctcctattagttctgtccctctagagaaccctgactaatgcaataggttacctggtatttgtgcctcacagctcttaagattctttccttcatcttaactttagataacatgttgacaatgtgactaggtgatgatctttttgtgattaatttcttaggtgttctttcagcttcttgtatttggatgtctaggtctctagcaaggccagggaagtttttcttgattattcccccaaatatattttccaaacttttagatttatattcttcctcaggaatgccaattattcttagatttggttgttttacataatcctagacttcttggaggcgtcattcatattttcttattcttttttctttgtctttgttggattgggtaaatttgaaaactttgtgttcaagctctgaagttctttcttctgcttgattctattgctgagactttccagagcattttgcatttctataagtgtgtccattgtttcctgaaattttgattgttttttatttatgctatctatttcattgaatatttctcccttctcgtatctttttttttttccttgcattggatttttcttttgtctggtgcctccctgattagcttaataactaactaatcttttggattctttttcaggtaaatcagggatttcttcttggtttggatgcattgctggtgagctagtgtgattttttggggttgttaaaaaaccttgttctgtcatattaccagagatggctttctctggttccttctcatttgggtaggctctgtcagagggaaggtctggggctcaaggctgttgttcaggttcttttgtcccacggggtgtttccttgatgtaatactctccctattttcctagggatgtggcttcctgagggccaagctgtagtgattgttatctctcttctggatctagccacccagcaagtctaccaggctccggattggtactggggattgtctgcacagaatcctgtgatgtgaacaatctgtgggtctctcagtcatggatactagcacctgctccacagtggaggtagcagaggggtgaaatggactctgtgaaggttcttagctgtgattaatccactattttggtgctggttggcctcctgctgggaggtgacacttttcagagatcatcagctgtggtagtatggagaggaacaggcagtgggcagggccctagaactcccaggagtatatgccttttgtcttcagttaccagcatgggtagggaagaaccattaggtgggggcagggctaggcatgtctgagctcagactctccttgggcaaggcttgctgtggctgctgtgggggatgggggagtggttcccaggtcaatggagttatgttcctgggaggattatggctgcctctactgtgtcacgcaggtttttaggaaagtgggggaaagccaacagtcacaggcctcacccagctcccatgcaccccaaagggccagtctcactcccaccatgcctccccgcaacagcactgagtctgtttccaggcagcgggcgagcagggctgagaacttgccccaggctacccacctcccagctgcaaaagcaagtggggctttcgttcttcccccaccggtggagtctgcacactggtttcatgccctcccctgaatctggccaggagacttctcattccgttggaattgttacaaagttcagctggaggtttccttctccctgtggtcttttgccagtgcctctggcagccctcctcaaggacccctgtgaggcaaggcagaaatggcttgctaggggatctagtgagtccacagagcttttcctgctgcttcctctacccctgtatttcgcttggctgcctaaattgactcacctccaggtaaggtcagaatcttctcccataatctagaccttcaggctccccagtgggggtctgtgtttgggggtggacgatctccctttttcacttccacagtttgggcactcacagtatttggggtgtctcctgggtcctgcaggagcaatttgttttcttcagaggttctgtgggttctcttggctttcctaatgtattcctgcggtcattgtggagcaaaagttcacaattcaagcctccacaggctgctctgtccatccgagtgggagctgcaatctagtcctgtctcccgtccaccatgatctccccgataacaaaggttttaaaaatgataaaacagaaaacaaattattgcaaaatgtcagctcctgtaaataaatctatgaatcgagggctaaattcataaaacaaattttaaaagtttgagtggtggttttgttgaagattttttattgttgtataaaaccagtcgaaatttcttcaggtaaatattaagttacttatgcaaatttctaataacagttcatagcatacagaaaatggcctttattgcttcagatatctctgtgttaaacttcaattatggcttcagtaatagtgaatctttcctttaaattaaaacacaatatttatactatataattctagggggggtccaaagacatggaaataaaagtcataagaattgaatgaaataaaattttccttgaaaaacagaaacagaaattataatgctatatctatttgaataagagcagctaaataacagtagctaaactaaaaagagataaatcaagataactttaaagagatagcccaggctgctgtgtctcactgtgactgtgggtgttgagggccctgctgctgggagagctgagtgaaacctgctggccctgaatccctaagcctcacagcacctcacttctccttgctgggaacctgatgactcaggggacccctggtccttgtgggcctctgttggctgtacctgaagcagcaggagcaaagaacccctagtaaaaggcaggaacttgaactccatgtcagccaggatctgcctactgcaatcatcttcttttcttagctcccggagctttctctcagtggacagaactgccctccagctttcctgagctctttccacacaggcaagaatctccttctgatagaaggaagtgattctttccaattctttgctgatattttcagccatctccttgtagaggctgtgaatctgctgtgtgtattcacatttctacacacgctcagaagtttcttcttcatttctaacctgtgtgtttccaccgcaggtgatcttctctgaagttgcgctatgtgttcttgatgtgattcaggtaggatttgaagcttcagctgcaggttctggatcccacctgcaagttgggaattttcaaactgcaaagacgctttctcagtttggagatgtttgatttgtcctgtgagctcttcattcattgattttttttcccacaattgtcaagctatttcttgatttttcttgactttcacagaacacatttaagtcaccatcacccaggacgctcttcagatggccttctgactgatagttgggcgggaggggctggggcaggcagtcttcattttctgctttcctctttagctgtactttcgagtcctcgtcactgtggtccctagagaaatctcccaactgcatggtgtccagcaggttttcagccatagattttaattggctcatggtatctttcatgacctgttttatttgtgcattcaaaggtttccagcttttctttctctccttcctttcctgtactgtctgcttccatcttgcaatttcttggtcgagcacttctggactttctgctaaatgagtgttttcattcaaactgttatttccttctgaagtttttctccatccttctttgatccttttaagatgtgtcctgaatcagtcacttgagaacatttaggagactcacttttccatgctttttccagaaagccgcctgtgtcctgcagggaagacctgctcagatttgtattaatgattgacaagcagggggattgtaatatttaaggtctgtggcaacttgagggcttcctgggtctgtgtctttagcccagtgttctgcctgccttctacatggacctcctgaagagaacaccttttgttcagctcttttcctcttcataaagtgccttgtttcttaataattaagaccacacagcagtacaaaccaggatctcccagggagccctggggtttatctcatgatctcagccttcaccagctctgtagccccagcagctccagagcagctggagagacatttggggaccagcagcccctctgtggctctgcctttgcttgccagtggcctgtgggccacagctgcctactcggaaccctgcggagtgttctgtctctaatgctcacaagtgcctggcaaccaggatagaagatcagttgtgctgggggaggggagccagccaggttgtagaaacagcatccctgactttgttctgctaactgtgcagagagaggtgatagtctccgcccaggccatgagggacctggaaatggctgatgacacggtggagctcggccacaccaggcccagctggccccacagcaaaccagagggtccaagtgggtccatgccctgtcccttcctgtccacaagggcctctcaggggacagtggtggggcccatccctgggtgaggctcagtttcctgatttcaagtttccttccgcacagggaagctgggtcctgcccaccaaggtcccagggatcctcctctgaggccccctctctcctttgggtttagtcaacggagagggagatggggagaggactgaaaggtctccccaaaggtacaagctgagagacctggatttgcaatgtaagaacccaggagaaataagtggaactgacggggtctaaaatgtcacggctattctgtaaagcaggtttgtccctgttccatccaagtgtcctgagtgagcgggactctgcttcgagggtgtcaggttgaccctggctctttcccttgtgtggccctgctatctttggtacatgcctcccaaggtggccctggggacagtctccaatccactgagtcatcttcagaagtctgcatgcatctgcagaggggcaggtccttctcagcctggattccactaaacctcttccccggcagagtcaggctcagagcctcctcgtgcagccctggactctgccgggagcaattagtctcagaatctcgatctgagagagaagcgagcgaactggcagctggggccagtctggggtcctaagggtgttggggttccagaccctcacaggacatagaggggcagtggaagtggccctcccaggagaagtcagatcccttgcagggccgcaggaccccaactctgcaagggcaactggttggtcttttaaaaggatcaaaatgtgttgaagaaacgacagtaatgcctagaacaccaacctggcactaaaatgagtgaaacagagttacaaccagggacccgaggaagatccaggatattttgctgagtgaaataggaagatgcaaaagcacacatgtagagaggaatccacaaaaatctcaaaggacacgtactcactccctcctttgaaagcagaatttgaagaagcaaagaggagctgctccctgagcttctcgcatctcccttctcctcccttctcccttctcctctcccttcctctcccctctactcccctctcctggcttctcctctccacttctctcctctttcctcctctctcctctcttcttcccttctctctcttctcatctcctcccttcccttctcgcctcccctcttctctcctctcccctcctcttttctcctctcctcccttcctccctcccctccccactcctaccttcctctcctcctccctccttccctttttgcctcctttcccctcgtctccccttctctcccctcctctcccctcctttcccctcctcctccttctctccccttctctcccttcctcccctcctctcctcttccctcctcccctcttcttccctccactcctcccctcctctccccatcccctctcccccctctcctcttccctcctctcccctcctctcccctcctcccctcttcttccctcctcccctcctcccctcctctctactctcccctctcccctcctcccctcctctcttcccctctcctctcccctcccctctgccctcccctcctctctcctcctccactcctctctcctcttctttcctcccctcctctccacctccttccctctgtcctgtactctgctctctcttcttccatgttgtcttttcttatatgtactttaaatatttttgattttgttaatacaagtactgtgtatgcaattcatacctttttagcagacagctcacatggacccaagttggggttaacatgcagattgtgcaggggttccctgcggatgcacccctgtgtgccctgatgtggacctgctccttcctgcttcctgggctccagacagaaacaccgtacccctgcaccagcctctgcctcagctcttcacagtcagcacaccctccgcttcctgtcagggtgttctctgctgagtctggttatgggatccctttctgtgcagagccatgctcccgtgtcactgtgtgtcaccttcaagctgtccccgtgtgtatgcctgtgtgagaatatgtgtgtgtgggtttgccatcgaaggaaaacctttattttggctgctaacatttggaaacatttagagaacaaacaatatcttttaaaaaacatcaaaggttcaaaaaaacaagacaagaaacaaactgttgtaaaatttcaactcctctaaatttgtcttaaattgaacttagaactaatctaataaaaatagtatgaagtttcaatggtgtgttgttgttgtctagtattttttggcattgttttttaaaaaccagtcaaaatttattcagctaaatattacattatttgtacagatttataataatagcttacagaagtgaactttattgttttccatgtttctattcatgtccaattttgatgacagtttaaatcatagtggacctgttatttaaatcaaaatataatacttatgcatataattttagagggtccaatgattttgaaataatgtattcataagagctattttaaataaatgtatatttaaaaatacaattttagaaattatagtactataaaacttcagaaagagaaattgcacatcaattaaataacagtagcttaactagaagataaatgaaaattacttttaaggacgaaaacaaacaaatcataaactctgagtgaaacctgcaggtacccctggatccctgagcctcacagcacctgcctcttccttgctgggaacctgatgacccagggggcccctagtacttccactcctctgtgagctgcgcctggagcagcaggagcaaaggggctgcttgggaaaggctggaacttgaactccacatcagccatgatttgcctgttgccatcattttgttgttttagctcatggagctttatctcagtcagcagaactgctgcccagctttcttgagctcttcctcatagaagagaatctccttttggtaaaaggaagtgattctttccaattcattgttcatgtcttctgccatcttcttgtagaagttgaaaatctgctgtgtgtagttcgtatttctgcacatgatgggaaatttcttctagatttctaagcatagaggaacatagtaatttaacagggagatacagagtgaacacccttttaatcaaatgataaaatgataaaagttaacataaaaatattaggacaagctgacatcatgtacctcctgatatgatgcactgaaaagaacacaacattatttctatgattttctgccaataatgcataacctgaatctaaccatgaagaaatagctgagaaccccaagttgaagggcataccacaaggtaacagcccatattcttcaaaactataaaggtcaataaaacgtagaaaaggctgaataattattttggaattaaggagacccaggggatgggagagccaaatgcaatacatgatgctggattctaccctggaccagaagaaaactagttacagatgaaattatttggaagactcacaaaatttaaatatggacaatggattaggtaaggattgtgtcactgttaaattccagttttgatcattgcattctggtcaggaaatgtcaaaatttagtgtcagtgggtttaataacttcaacttatttcaaaacaaagagttgctaaaattcttcaaccatgatcccttcctgacattgtggtcaagctatgtatggctcatggtaggtctcttctcattttctggtggggtacttaatgtgaaaacacagcaggtaaaaccatcataaaacatcttcaagttctaacttccttgagtctacctatgtctgagagtgtcctccaggacatttcagggaatatggagaacgtattacttgtggatgtccttctccaatcaagtccttcaatccttctgttcctcctgcagtcttctttctggccagtatgatgcctgaacacactctgagtctaaagagcttctggcacctatgttctctgctggcttccgtgaaaagctctctctttaaatagccataaacctggtagcttaagacaactgaaatttattattttatagtcctctagacctaaagtcccaaatcaaggtgccggccgggccatactccctctgaagtctctaggaaaaggtttttctttgctccttccagcttctggttgctgtgagcaatcctgtcattccttggcttgtggctgcacccctccattctctgtctccatcttcccatggccttctctgtgtgcttctctgtgttctctaatctatggataccaatcatgaatttagggccaatcgcaatacagtaccctctcatcttcatccttaactaattgcatctgcaaagacctatttccaaataaggtcatattctgagattccagatgaacatgaacttttgggggccattatccaacccactacaccagtcttcactgcctcaatcaatttccatggagtttctctggattatttgaaaacccctagcttggttttatttctcctggattccaaattttccctttgaatagggctccttctctccacccacaacttagaattctcttctctctgtctcctgttcaacttcctttttctttattctgtatctcacagagacaggcggtatccttccatacccttccttggctcccaggacccacacctgttaaacatatgatgtgtctcatatgtggattctacccaagatcctacagaggaaagatttgctgggactgaggtacggtcctaaagagtaagtcaagatcctgctcacagactctccaattctcatggaggactgtggcttgtcaagtaactcagaaccactgaatttttctgttcaaccctattctagttattttggctctaagataaagaaaaattaattacttgcatatttgatcaactgaaaaaatccaggctgtatgttttgagtcctgatcaattaggaccacttgcctaaaggaaacaatttaatgatttccttcactttaaagttgtgaagaaattctggctgcctttctcattgcatctttatgaaggccagactttatgaaaaaatagtgatgatagcaataagtctggaacttggtaatcgacaaagctctgctttcgtgctaagtctcaggagagcttttcagtactctatgaagtatggattgggcagatcatcctgccagcattacagacagacgaggagacaatcatactgcttttgttcttggactggctcatagtttgggcacaggcatgattaatttgttcataccattgtaagactcttatctctaaaagcacaaagagaacacatcagaagtagatctttacatggaacaaaaccaactaaccattttgcccaaggagcgactttctcatctgttttttttctcatctgtttttttctcagtttccttctatttctatttaaaaggcaagttaaaaaaaaaaacaataagatagcatagtagtggaaaatagctcagcccttacagcaagacatcctaggctgaattccatttctgccacctactaacctgatgaacttgggtaatttccttaacctctctgagcctctgtttattcacctgtgatattgtttggctctgtgtccccacccaaatctcatcttaaattataatccccacatgtccagggagggacctggtgggacatgattggatcatggaggcagatttcccctttgctgttctcatgatagtgagtgtgttctcatgagatctgatagttttaaaagtgcggcacttccttgctctctcattctctctctctcctgctgcattgtgagatgtgccttgcttcccctttgctttctgccatgattgtaattttcctgaggcctccccagccatgtggaactgtgagtcaattaaacttcttttctttataaattacccagtctcaggtagtattttcatatcagtataagaatgcactaatacaacctgtagtgtgaacctcaaagtcaagttgagaggattgaagaaatgatgtagattatgtaccctgtgtgacgcctctcatgttattcagtggtagttggctccctctccacaccttcttgggagattctaattttgtcgaaggatcagtcctagatcgcagtggcagtgctgacattgctgtaaacttcaggccaatgtggcagcataccatctagccatattgcaatggagaggtcatgcaggggtactgtatgaatcagtgcccagagataaaggggtggtctgtcctctgctgcaaagtaggacaatgcttggtctccagctcttcacctcctggaaactcacccccgttttgtgcttgaattcatgctctctgaacaagagaaactcatgtcatctctctcatcctgtaaagcactgctgagaacaatcatgctaaaataatttagagagagaaaatgttaagcaaagactgtcaaaacaatactcaagaataccaataaggaaggctgttttcagttagcaaaatctccaactaggggagattaaacagctcttacaaaagtgcgcgttatacaactatttcatcacacgttgagagccagcatctcaggatccagccgtgaaccaacatctgaaataccttttcccgtaatccccttcatccaagaataaacacttttaatgaaagtcccaagaggaagtaaaaaagaatttgtttttccagtttcttttaacaatctttcctaaaatagggggctattcttgtttgcaccttccttataacagttcagtcaaatgtggccactgctacagcttctagcaagttccctgggtgcagagaattgggaactggcacctgcaagacaagcaggcaccaggattttgggggattttaatttactaactactctttatccttttggtgagcttgcatttcaaaccttgccaagagacacatctccttgaattctgctgtcctgtctcaatgtgaaaggcttaagaaggatcattttgttatttcaaaacactagagcaaatacttccaagactgtcttgaaaagttctttggaattaacatcaagcacttactatataatgaaagagtcatgcatatacgattgttcttttagctgaggagtgtttggtagtaataatgggaacagaatttgagagccagattctaagcaggaatgtaataacagacttgaagataaaaaaaatatggctttcccttagcaggaggagttgttgaaacctgaaaagctctgtttatggttttaccaggagcttctaacatcatgtagaaaatggatgtacaaatgtaattaaacacagtaacatgaaactgcatggaaaatttggcagggaatcatatttttttcctgattatataagtaatacacatgttctttgtggaaaatatggacataaaaatatggcatgtagaagaaaattaaaattatacaattataccacaaaatcattttctgatgtatatatattatttttctaaaaaattgtatttatgccctattcatatttgtcctgttgctttttgctttatgcttaatttaatcatatctttatattgtagtatgtgaacggctatctccctaggacacgtattgcaaacattgtttttctttaagatctagagttttatctgaaacatttatttgaatcttgcaatccactccaaaacatacccacatttgttttactatcaaatatgtagcatataaatataaaatgtaaactgcattgtagataagtaaatattatgtacatatagacataaaatataaactacaaaattataatatataaagcatatcaaaataatattaatgaaatgtatgaagctgtacataaatgaaagatgctatgtcctctttaaaattttaatttcataccatttaaacatatctgcttaccacatgcgtaagaatttctttgcccaacttgaaatagcaaccttaaaatattctatgtcactggaaaaaacttgatggcaattttttatatacaaccccacatgcacacacacccacacgcagaagaacaacatccatttagggactccttggacaaaatttcaagtcttgaagaagtaggtttactcaagcaaaactaacctcctttccaagtctggaataggtatgagatgtcctttcactagatataaatttatcaatgtacagaaaaacaaaatcgatgggtctcaatttttcactgtaaaatttccttccttaaatttcatacagtttgggcacctgttgttccttgttggcctgtaagaaaatgagtcaccatgtgcaaaagatgagccatagatctgttcagaaatagtcactcatgtttgacatgacagcttgttttccatatattctcttggttgttattttacattgcatacatataataataaagtcatattttctcccagcatggctttctaagtggagttaaatatatcaatattttatatcatacttcacagagtgtcatggcttcccattttgccacctgatccagactgacagtcaccgctgtaggggaccataccatatacttaggcatgataaaggcccataggttgaaagacagagaagcatccctgacccagtaacttaccatttactggaggaacgagcccagcctaggctgaagagctagttgaggaggtgtctccaccacccaactcaacgaagtctaacatttcacagctagatcatcattcctttggctttaacctgcagaaattgtattgcttcccaaaatgcatatataagagaggtaaagccatacaatttaatcagtcatctgcaatcgtgtttctccaaaaggggtggccaggctgtctgcatcagtatcctggggtagggaggaggagggtggatgattgattggagatttctgagtcccatcatgagagattcttattctgtagatctgtggaggcctctgggagtcttcattttagcaaacattccaggaaattcctgtgaacattagaatttgagaaccaatcatttatactctgaagtgaatgtacttacgaatccttccttgagaacagaggagttgcttactaatctctggggcgaattcagtgaccatcactaacagacagaaagaggaatctggacaaagcacaggacaaacctcactttttctggagtggtcatctattaagtgctttcttggagagggtatagtaattgtatatttcatataaatacactgtagaaagagaaaaacaaatatttagatatttgtgtccccttctgattatctacgaagggatttacatggcacaaattaaatctatccactcaccctgaagttctgtccttccttcaagcaggagccccagcagagtggcccagggccagctgtttttaagcagcctctgagagcaacacagcaggtcccacccaggagaccacagagctatggtgggggaagccacttgcctcctgtatgagttccctggggttgctgtgacaaaggacactgagagagtgtctcagataatggacattcattgtcacacagttctgaggctggaagtccaagatcaaggtgctagcagggttggttccttctgacagcaatgaagaagaatctgttcctggcctcttttctgaggctggaagtccaagatcaaggtgctagcagggttggttccttctgacagcaatgaagaagaatctgttcctggcctcttttctgaggctggaagtccaagatcaaggtgctagcagggttggttccttctgacagcaatgaagaagaatctgttcctggcctcttttctggcttctggtagccttgggcattccttggcttgaaggtggtcatcttcttcctatgtcttgaaatcatcttccctccatgtgtctggctctgtgtccaaatttcctctttttgtaaggatagtggtaatattggattagatcccaccctaatggtcttatcttaaattgatcatttgcaaagactatttccaaacaagatcttattcacaggtactggagattagggcttcaacatcttttgggggtcacgattcagcccatcatgccccctcttctcaggtctgtctgaggcttgctgctctgtcccttagtggctggggacagcatgcttgcctatggccatgcctgtagctccactttgctctgagaggctgagcaatgcctctcatcagtcttcccacagccccttgagtggcccagcacctactcagtgacccatagggatccggtagaaggagcaaatcacagcaaggccataaagaatttaaagcttaacccagatgctgagctgggatgcaaagcaacaagctagaaaattgacaggcaggccccaaatggtcttgcagagtctaatgtcatcaggtttctctgtgatgtggcttttattaaacacttcttaataatttgtgttattacttctgagcttagaaatgaattatactcattctctggaaatatttttagactttgcctctaggtcatgaccaataaaaggtttaaattcaaatactgaatgatccaagggctcacttcctatagaaatatcttcatctatgagaatgataatagtgataacagcaaatatccatggggtgccataatttataaaaattatgtgtttttacaagaattatttacttgtcacctcagaggaaactcaaaaggaatatgactattagccctcagcggaagctgaaatgtatcacctatcgtaaggtatctagtctatttcccatgatgtttactttttgtgtccgagaatgttgcatactctcattcaaagtctttcccagaaaggaccagttgataaagccactggctctttccagcatcacgcctgtactgatgccacagtggacagcctttgatgccacaggaccacagctcaatctcctgattgtgaggagaagagtgggggtgttctcactgccccagggcattactaaaacaggtttgatcagcaagacattaaacaacagagattaggcttaggaatctaatatgccactatgtgcttactgttgtccaaatattaggaaacacaatcccagatcagtgggttagatttgtgttcaaggggacaagttggaatgtgatgccctcacttcaggtgagctctctttacttgaaacactcttaggtttactggaaggactcattctcgggaagtcacgctcttttttacttaacgtctttcatcatgttaaacatttattttatattctctttcagattggcttcttattaacccagattactgaggttctaattctatttattttgttcccgctgacccttaagtggagtatattgtgtcctggtatatttttatataccaggttttatatttgcttctgctaagattccaaagaggcatgtttgtctgggaaaatctgcaagctaatttcttagctagggaattcctgaacaaagaaggaagtgaaaatctgagccccaactttgtgtttggaaaagggctgcactaatggattaggagattcctaccttcacacctaaaccaggcagaaagggatagacttccctgttgcaatcctgtgctaatatgcaggtaattttctggtcttaccttcagagttctgtcctaatggaggaaatctcacttcccactcttgctttgtatggttccgagacctcaacttctgtccatgtatggacattgaaaatttaggtttctggctggcatgttggctccatgcttcgggaggtaatcccactactttgagaggacaaggaaggaggattgcttgaggccaggagtttgagaccagctgggcaacaaagaaagaccccattgctacaaaaaatttaaagaaattagctgagcacagtggcatatgcctgtagtctcagctactctggaggccgaggcaggagtatttattgagctcaggagtttgaggctgcaatgagctatgattcagcctgggaaacagggagagaccctgtctctataaaaaaagaaataaaaattagtcttatatgtttccaaagccaaaatccactccattcccacctgcaagcattaggtcacatgtttctggcacctcgattgaaagcatttttttttaatgctatacagcctttctaaacatttgcagcatgaacattttcaggttatccagattgttgtcacactgaccacatactctgacatttccacatcagcatttataacctcacctgggctgtttttttttttttttttttttttttttttttttttttttttttttttttttttgagacggagtctcgctctgtcgcccaggctggagtgcagtggcgggatctcggctcactgcaagctccgcctcccgggttcacgccattctcctgcctcagcctcccaagtagctgggactacaggcgcccgccactacgcccggctaattttttttgtatttttagtagagacggggtttcaccgttttagccgggatggtctcgatctcctgacctcgtgatccgcccgcctcggcctcccaaagtgctgggattacaggcgtgagccaccgcgcccggccacctgggctgtttttgaagctgaactcaagaatatttccttagattcagcataaagaattggagagccaaaatatgaaatatatcctcttctaagaaatactcctaaaagtaaagttaacacctcaggtggccctcttggtgttctaaatgatgaatggcatatctgtatttcttcaattagtccaccaataccaaggcctccgttttctaggaggacttgggcacagaaccatggtactgcggcttacagcagcaagtgcagtcccattaacaaccagcagatggcgtaagtataaccatccccgagggaagggcccagcgctcctgagataggaaaggaggaagtcgtttattatttaaaggagagtttgaggacggacttgagctgtgtgaaatttgagatattcagggaagctgatatgtgttaatctgttccaagtaacacatgaaaatatcttttgccaacccaactctgtttactgttttaatttcctcaaaagaaaaaaagaagtgattgtatcaacagtgggacaggaggaaaaacaaggaaaatatccaaaggcagggacagaagtctgcaggttatattaataaaacattttaagcaggcaggtctttctttgaaggtgaagcacctttcatttgcttgccactctgaataaaaattacccctccaaacacaaaataaacacaacatttaccatgccctgccaactttgcctttgcatggagttaccatggactttcctcgttgtgaaaggaactccagccccttctgaaccttcaactgcaactctgagcgggtgagagtgcatccctactttccccactgttctggggtatggtaagacaggcttgtctaaatcctgtcgactccaaggacttgtagaaattccttgtgagacaagagtggtttgataaataattctaccacaaagacacgtgcaagggaatgttcattgcagccttattcacaatagcaaagacatggaatcaacctaaatgcccatcagtgacagctcagataaataaaatgtggtccatgtataccatggaatactgtgcagccataacaaatgaataagatcatatcctttgcatgaacatggatgaagctggagaccattatccttagcaaactaaccaggaacagaaatccaaataccacgttttcagttataagtgtgagctaaatgatgagaactcatgaacacaagggaacaacagacactggggtctacttgagggcacagggagggaggagggagcggagcacaaaagacaacaattgagtattgggcttttaataccttgaagcagaagttaaaaagagaaaaacgagttttcctgtacttacttggctgactcactccaaggctagcagtaggcagggccctagtggggccttgataacactatctgaaaagccagagcccaaaggaatgagctccagagactctcccaacacctcctcccccaagcaagtataagaaaaactgtttcttcgtatcagtttccccctttgaaattctttccctataccattatcctttgatctgctctcacaactacttttgtaactatttctgcaagtttgcaaggattttgtaagttcttgttttccagctgtgccatatggtgaaggtcacaagacaagcctgagttgtaaaacatgtcgctgtttggtaaactgcctttgttctgcttctgtgaagcttgcttgcccgccctgcaggtttcacgccactagctggccaactcccttcagttgcatgtataaaagtcaagccctgtctttgttcagggctcagcctttggatgttaatctgctgggccagtggccacctaaataaaatcttcctgttccacccattggtctctcctgtcccttaattcccacaacaacctgagtgatgaaataatttgtacaagaaatccccgtgacatgagttcacctaagtaacaaaccttcacatgtacccctaaacctaaaataaaagtttaaaaaactttatggtttggctacctcagttatcaagggtctcatcctacctcacatgctccacatagcaacagagaggcacccaggcacaggagcacacatgccctcaggtgcccacatgcactacatggagggctgcttcagtctctccttccctcagcaccagcatcctgggatttcccagaggaaaaaaaacgggagccagtctgagtggtcaatgttgaagcacagagggttcagaatggatttgcacaacagatagctctgtgtctaggaatatcctggtctccttcactcatggcccaggtcatctggcttttgggatgaggggtgctacatgacacacagggcaggatgtcaagatgaaaaagtccagtgtagagtttagtaccagaagagagaaaaaaatagaaaaaagtgtacagatcagggtgtgatgactttgatgatgaccatttctttgaattgggcaggttggaaaagaaaaataagcattgggtggggcaagtgcaggttaatctgggagaatgtggaaaggcacaatacaaagtaagagactgtatgttgatccctggagatgttcctgaggacacaggggatacttcattagcatgtaggctcagtgatagaaaggattcatcattttgttgcagaggaaaagttcattgctgtgagatgtccagttttcataatatgaaaagagcgtatgacaatgagtattactactcaatgatgagtaatatgtttttatgaatatgcatgtgtaaaactgagttttttaatcattatattgaatgtggttttccttactccctcttattgctgcaactctttgtgaaagtgatgcatttccctttatgagttactgattcaacaccctcttgtccagtttgtcacatttttctcatttctggactcacagttctaattcagttttctcctggggtttcaacatggttaatttttttcatttgctcctttttcacctttgttttaaatagtggtagaataaatcacacaccttcttgctttgcttgaaaattaacttttgcatcttccagtcaatagaatttttgtttaggtccttgaatacagattgagaaatgtaatggctaagttaccaaaatcaactaaattcaggtaaaacatttttgttttaattccattaagtcttgtttgggtttctttttctttgcataggtattaataatacttattctatttccagtctaccattgataaaagataaatgcactttcatttttctgaatacttctatttaggaaaacctactaaatgtgcagtgagtaattttaatattctattgaacactcactaaaattgcagtgctgagtatgatagttaaatggagacccagaggagaccccatctgtggacagttacaattgtacttagaccattttcctaactgggctctcctttagttccaggatacaagctgaaagtaatagtaataatctactctttagatttaatgtgaaaaataagggcaaatgtttaagctcctagaaatataaagttgtccaggtttttaatgctaactttggtcatttaaaaataatttgcaagacagaatcccaaaccagctttcttactagtgatagggcccaaactgaaaaactgctctctgctgatgcagaagcagacaggctcaccttttttgatcgaagtgagtggaaactcccctgaaaaaggaggtttttaagcagcaactaaacctcagcccccaactgaaaaacgctggaagatcagggattcctggaggaaagaggtcctggacttcagcaatcgtcctattggtttaggctacaaggtgcccaagccagcaccaggcaccaataggcaagctgctgcaggccaggtcaccttcactcaggatccctttgtggttaccggatgtcaactgaggaacgtgatgagacaagtctcagtcattttatgagatttattcaccaaagttaaggatgtgtgtccgcaacacagcctcaggaagtcctgacgacatgcgcccaaggtggttggggcacagcttggtttaatacattttagggagacatgagacattaatcaataaatgtaaggaagtacactggttctgtccagaaaggtggggacaactcaaagcagggaggggacttccaagtcacaggtaggtgagaggcaaaaggttgcattcttttgagtttctgataggcctttccaaaaggaggcaatcagaatctgcatctatctcagtgagcagaaggatgactttgaaatagaatgagaatcagatttgccctgagcagttcccagcttgaaggggcccaagatatcttcctttcacaaagtcttaatagaagctgaaggcttcagatttaacccaattactgctgttaaacattgcatacaatggttctcaactaggggtgattttgacccccaagggacatttgtcaaagtctagaaacagtttggtgataacagctgagggaagggatgctgtgaaatctagttggtaaaggccaagggtgtagcattctgaaatacacaaaacagcctcttgctccacccaacaaataatgatttgacccaaaatatcaacagcaacaacactgataaatgctgctacattgaactgtttttctaaaagtactaagagattaaaatttatatcacatgactaatttatggggattagaagtttttaagagctttgttaagatataattcacataccaaacaattcaacaattgaagtatgtaatacaatggtttaagtttgtttacagaattgtgcaattgccacattacgttctatattttaatcaccccaaaaagacaactagtacattttagtcatcatctctccatcctccctctgcttcccaccgtaagccttagcaaccattcatctactttctatctctatagttctgcctattctgtacatttcacattgatgaaattatacagtatgtggccttttgcatcttgttctagcataatgttttcaaagttcatccatgttgtctgtatcagtatttcattccattttattgccgaataatgggatttataacgatactgctgcagaaatcaggagaatggagagaccactggatggaaaaggaggattttattgagtgcactcagacccggcggattaacatccaaaggctgagcccttaacaaaggcagggcttgacttttatacacacttctgaaaaggggctggatagtttgaaacaagcttatagtggcgcaaaatgcagtgacacaaaagcaggtaacaaaggcagtttatgaaacagtgacaggcctgtaactcaggcttgtttaaacacatcatgtgactcctgctatgtggcccaggtggctgttatctaggcttgcccaagcttatcttgtgtcctttgctgtgctgcctggatggaaagcaggaacttacagaaaccagccacagaaaacaggaatttgcaaacttacaaaacttgccagggtatagcagcacatggggccggggcaggttggggggtgatggggggcagggcttcagctgcctaaaagaaaaaaaaattgtttttcctctttttaacttctgcttcattaccccctttgatgctttttataaatgaggtttaatagaaagaatcattattatttaattcttcatgtgaaggtagttagctctttatttggcaagggttaatatttagttagagccattagttgagtggcagtttgtttctctacaagagcctctgtagctgtttggatgttcttaacaaggagaggtaggagacaagggagtatgaggcagactcctagtatggctaaaactattcctactaaggttttaaatcctctgagggataaaaaccagcccccaaagagggaatctgaagaccatcttttccaagcctggaatggaacatgggctaatttttggatttttgcagttatattcttgatgacctttccattgtcatcaatctctaggcagcagttagttaaactgaactttccacatacccctccttcctcagctagaaggtagtttagggctaatctattttaataaatagcattccttatttttgtggcttgctgggctagcagatttaaggcctttactgtatcatttgtcataattttaagtactgcttgtaaccttatgatgtggttgagcatgtaaagagttgtgtggtattccctacattccaccttctgcccaggtggctgggccataatattggattattctttcagggggccattaatcgtccttgcatttccctatggttatgccccttttatttctccttttagtttcatcatagacagggtaccctaaggcttctccttgttttaaagggattagaaagaaagacggtctaattgttcctagtacacaggcccttggccatttaactggcagttgccgatatgcccacagtccacaaattcaatagaggccggagggtgcctgtcaggcatttggagcttcaagttggtaccgagagtagcatatttatacccagcaagggcaaaagaggtctttaccctggggaggtggctgagcaaagtggcaaaacagcagtaaaacactaatattataaggaaagctactggacttaagatttctaaccatattgacttccctgatgatgactcgagcttcggccatgtgtaaactagtcagcttccagggtgactagagcagggctgttgcctcctcaagcttcggccgtgcgttgactggtcagcttctggagtgaccagagcagggctgtcattgtcttcaatggcaatttggtcccgtcgtaggattggccagcacagatggtctggatcctgttggctggtccattcatctcaggccgctggcttcagctgactgtggtggatccatggtacaattactgcaactgtaacggcagagtgagtgggcaagattacagtatggggcctatcccatatgggtctcaaagtggttggattccattttttgacccaaatagcatccccgggtttgaaggggtgtgccaggtctgtcaggcttatgggcattctttcccatacccagccatagacacactgcatggctatccctaaagcctgcatttgccttcttaaagttagttcccctagttcatggagatcacccttaacttgacctataattggggttgccggccgaacaagatttcatagggtgaatacctggtttgtttggtgggggtgcaccttactcagaggaggaccatgggcaagacctgatcccatcttagatgggtctcttgacaatattttttttagtagcgtttgagtgtccagttcatgcactctatgttttttgagctctgcagctggtaggctgtgtgtaatttccattttatttttaatagccataccagttcttgaactatttcagctacaagtgctggtccattgtctgacccaagagttggggcagtccaaatcttgggataatgtctcttaacattactttggttacctcccgtgctttttctgtttgggtggggaaagctttgactcatcctgacaaggtgcagaagagtactagcatgtactaatagccccctgctcagggcagctttgtgaagtccataagcaggttttcacagggtgtggctccaatttcctaaattcccaggggccgagtaggttattatgggtcattctgagcacatgttagacattgcctgcacacagcttgggtgagggcattgagccgtggcacatagaggtggcatcccagtagcgtttgtagtgccgttttccccatgtgagtctcttggtggaattgttttacaaacttaggggccaccatttcagggatggctagtctcccatcagagaatttccaccatcctccttcagtgcattttccagtttcttgggcaaaccaggccttctcatttggagagtaacttgggatctcggggagggaaggttctgggaggagaagcatagctaaggattccttttcaaagtgtggagtaatcattgctgtccgttttgcctccctgtctgcctttctgtttcctttggcctctagtgttcttgctttttggtgccctctgcagtgcataacagctaccttctttggggcctatacagtacctaagagctgtaaaatctcctctttgtattttatttctttttttcccagcagttaagagtcctctctccttgtatatagcttcatgaacatgcaatgtggcaaagacacacttttgtctttgtgatttggaatcagtgtaaatattgacctttttgtctctcatcagcaaaagagcccttgttagggccattagctctgccttctgggctgatgctccggtgggcagaggctgagcctctatcactgagtccaacgttaccaccgcataacctgcccaacggaccccttccagtatgaaactgctcccatctgtgaactacttaacaactgggtccctgaggggttggtctgtaaggtctcccctactcaagaatacttcatctaccattttcacacagtcatggagtggggttcccagttcaatcaggagcaaggtggctgggttaagggtgtttactgtttctaaagctatgtggggatttttgcataggagtccctggtactgagtcattcctggatttgataaccagtgatgccctctctggttcattagagttataactgaatgtggtaactggatggtcagctgctgccctagagtcagtttgttagcttcttgtgccagtagggcagtgacagctagtgtcttaaagcaaggaggctaccttagtgccactgagtctagttgcttggataagtatgccaccaggcgatgccacaatcctatgaattgagtcaggactcctacagccattcctttttgttcatggacatatagaaagaaaggctcagttatgtcaggcagtcctaagactggggcctgtgttaaggcttctttgatttttttaaatgctttctcctggtcagcctcccagaggaggggttccttttctctccccttgaatctggccatgttcagtataatagaggggtccctgagtttcccggggaggcatctgcaaagcccaggcatggccagactggaggcagcaggcttgatcatcctgactttcctccttgacctggggcagtggttttgatttttctttttgaggcaaggcccagggttcgttaccatttgaatttgactcctcgggggctggccttagtaaaggcgggtagattggactgtagggaggattcctatctcctctggtgattcctgcagaactggtttttcctgtggctttccctttgtttctgtagctgacagcgaagctgatttttctttcactttaagcttggcttgagccacgagtgttttgccataagctgtcaggcagagctgcaaccacgcaggtcagttttggactatatgtagccatgagtcaatataaggaaattggtctggatgccctggctgtcctcccaacccagtcaccaccttaaatacatggccaattgtttccctatctatagttccttcgaccagccatctcacaccaaaagaggtccattctatttcacagagagttctcaacctctggggggtcaacttgatcccacaacactctgcataacttttcttgaagttctttaacatacattgtaatggggtgggttttgacagcttccttcccatttcctcccagttatgacacaacttattcactcttttactttctcttcagactgattagaccatctccctcatgggaactttcagatgctgcttagctttaatggagggttcatatgagtcccaaacctggaccaccacaatcactgaattgtggggtgcctccctaagccatatgtggtagccccggaggacgtttgccactagtcctggttggtcccacactttgctaggggcgtatggtctatgctaagagacctgtggccccacacacttcactccccacattgactccttttagaactgcctctttcacatgcattcacacacttccctgctccccattccttttctctgggtggggtgtaggtttcatccgactttgtgagccactcccacatcctgggtcagactactcagtgcacccctaggagttgatcaggctccccttctgtccttatgggatgggtcctgtcttgggccccaaaccttaccacagtcctgtggcgcactatccctgaaatcatcctgtaatcccttggattctgttgcgctgtcagggaggggtactggatcacggaagaaccaatcccttctctgggtttaagttccccgatggcatgcctgaggtcacaggtctcccccagctcagggccccagacccacaggcaaaggagacagcaaacctgtcatctccactcctggctggttcaccaaaatattgcaggaatgaggagactggagagactactgggtggaacaggaggattttattgagtgtgctcaggcccagcagattaacaaccaaaggctgagtcctgaacaaaggcagggcttgatttttatacacacttctgaaagggggttggctagtttgaaacaagcttacagtggtgcaaaacgcagtggcgtgaaagcaggtaacaaaggcagtttatcaaacagtggcaggcctgtaactcaggcttgtttaagcatgtcatgtgactcctgctatgcggcccaggtggctgtaatctaggcttgctcaagcttatcttgtgtccttcactgtgtcacccggatggaaagcaggaacttacagaaaccagccacagaaaacaggaatttgcaaacttacaaaacttcccaggatacaatagcacacggggttgggtggggggtcggggtctcgagttgcctaaaggagaaaaatttgtttttcctctttttaacttttgcttcaataccacattttgtttatacattcagcagctgatgggcatttgggttgcatccactttttggctgttctgaagagtgttactgtgaacattcatgcacaaatttttatgtggaggtatgtttttatttctcttgggtatataactaagaatagaatgattggatcatataataactctgtatttaatattttgagaaattgccaaaatttttcttttttttaatgttaccacccataacgtttgaacattccaatttctttgcatccttgccaacacatgttattatctgtctttttcattataactatccttgtggttttgaagtagtatctcattgtggttttgatttgcatttccctagtggctaaagatgttgaacatcttttcatgtttttattgacaagttgtttctcttctttgggtaaatgtctatttagatccattattgttttttaaactcagctatttatatttttattgttaagttgttaaaaattcttcatgcagtctggatatgagcccattatcagatatatgatttgcaaatattttctccccttctgtggattgtcttcttttcactttcctgattgtattatttgcagcacaaaaatgtttaattatactattgtccaaattatctatttttctctcttgtcagtttttttttgtttgtttttattgtcatctctaacagcagttcacaaagtttgctttcatgtttcctctcaagaatttcatagatttagctcttctatttaggtttatgacctacctcaagttaatataatgtccttagtgaattatcttggcactacttattgaaattaagtagtttacttttgggctttcaattttattctattgatctatatgtttatccttatgtcaataccatactgttttgtttattgtagctttgaaataagttttgaaatcagtgtgagatcttcaatttagttctttttcaagattcttttggctactctagttcctttgaattcccatatacattctagaatcaccatgtcagtttctacaaaatagccatttggaattttgataggtattgcattgaatgtatagatcaatttgatgagtgttgctattttaacaataacaactcttccaatccatgaacatgggatgtctttccctttattttggtcttttaaaatttctttcaacaacgttttgtagttgtacaaagtgttacattacagcatcatagtattcactgtgaaagtcttataatttttcattaaatttgttcccaagtatcttattctttttggatgttataaataaaattgctttcttaatttcttttcagattcttcattgctagcctataacaatgcaattaatttgtgtatatttatcttgtataatgcaacctttctaaattaatttattctaattattaatagtagattacttaaaatttctacataccaaattatgtcgtatgtaaatataagaacttttccttatgtttttgcaatcttaatttttaagatttatcttgtttacccaatttcccaggctagaacctccaatatattgttaaatagaagtagtgagagtggacacacttatgctgtacttgagctttggggaaaagcattcagtctttcaccattaagtatgatatgagctgagattttgtattgtttgttttgtttttgtagatacccttcatcaagctgaagaagttttcctctattcctagtttattgaatagttttttttttatcataaatggattttggattttgttacatgctttttatgctctattgaaatgaccacgtgtttttttgttcttctttctattgatatggggcattatatcgactggttttttggatgttagaccagcattatatttctgagatatatcccactttgtcatagtgagtgtgtaatcctttttgtatgtatccatatttaatttgcttgtattttgttgagaacttttgtgtttatattcgtaatagatgtaggtctggttttcttgtgatatcttttgtttttgtgtccatataaccaacctcataaaatgagctaggaattgttttctattttttcaaagagtttttgaataattgtaataatcatttgaataaataatgattctttaaataattggtagaatgcactagtgaaattatctgggtctgggcttttcttctgggaagttttaaaattactcattcattagaggtttttttttttttaagattttctatttcctcttgagtcagttgcagtggtttatgtgtttttagaaatttgtccatttcatttatgtccatggcatacaatctttcataccattcccttataatatgttttatttctgtaaggttagtaataatattccctctttaattctcgattttaataatttgagtcttctctctttttttcttagtcaatcaagctgaaatttggtcaactgtgttggtttgaccaaggaatcaacttttggttattaagttttgatataacttttctaatctttattgcattaattagtgctctattttttatgtattactttcttatgcttactttaggtttcattttctcttatttttgcagtgtcttaaggtggaagtttgggtaattgatttgaggtctttcttcttttataatgtagatatttatggctatacattttcttctaaacattgctttaactgcatccaattcattttagtttggtgtgtttttgttttaatttatctcaaaggatttctgaatttcccatatgacttcttctttgaatcactggttttatttatgaatgtgttatttaatttccaaatatttatacatttttaaaattttattctattattaatttctgatttgattccaatgtcattggagaatatactttgcattattcaaaccttttaaatttactgaggcttgttttatggcctagcatatggactgtcctgaaaaaagctccatgtacacttgaaaagaagatgtatattctactgtttgtgggcggatggtctatagatgtttgttagttctagtttgttatagtgttgtttgtttataattatatatcctttataaccttcttcccattctatacattattgaaagtgagattttgtagtccctaactattattgttgaattgtctgtttcttccttcaattccataagtttttgctttatgtattttgggacactgttgttaggtatttatatgattataattattacctttttctcatagattggcccttttatcattattatgtgtcttccttatctccactaatattttctggtcttaaagttgattttgtctgatattagcataaccactctggctctctaaagttgctagtggcacgacatatcttttttcattcttttactttcaacttatcctctgtggacaatatatagctgaatcttgtttttttatccaatttaacaacttatgccttttgatttgactgtttaatccattcacattgcataattattactgtgattggatatatgtctgccattttactctttgctttctatatgtctcatatcacattttgttcctctgttccacctttattactttcttttgtattaaattaatgtttgaagtataatattttaatttttagtgatttttagtatatttttagctgttttcttagtggttgccctagggctgtgtagactgactaagaaaaaagagagaagactcaaattattaaaatcaagaattaaagagggaatatcatcactaattttacagaaataaaaattattataagggaatagtatgaacagtttatatattaacttatcagaatgatgtgtactaccttaatgcaagtaaaatatagacactttactcttacatagctctattctctcttcctcttttttaatattgttattatacatattacctatatatatgtaacgaacctaaaaatatattgttataattattactttatatagttttatgtcttttaaagaagctgagagaagaaaggagagaaatacgtatttgtagaatttctttcattaatcttcttatttatcctttctgagtctcttcatttatttcctgtgcattcaggttaccaacagttgtcagcttcctccaacacagctccactccctttcacctcctttgggctctttttgataaatatgttagattttatctttgttataagccctagattatattttgagtgaaaggtctacaccaagcttgtccaacctgcggcctggggaccacatgtagcccaggatggctttgaatgtggcccaacacaaattcataaactttcttaagacattgagggtttctttttttctcatgagctatttttagtgttagtgtattttatgtggcccaagacaattcttcttcttccaatgtggcctagggaagccaaaagattggacacccttgtgtccaattattctacacaatatagaaaaatgattacttactgcagccctgggttcctggccgactaaagagaaacacccaatagaaacaacttccttctagcaagaattaacaatggtaattaagagactttgtaactttgtgatctgttcaaaagactgcccaaggctaagcctaaaggaactttccaagttattaacgagagtttcacaactctggagccttttatgaacaggacagcaatgcactgaaactatcacaactgcttcaatgtctgatattcctatggttatagagaaccaacatgaatattgcagttagaattactagagagctctttttcttatataaacacttcaacaaatatgagtttatgcataaagacatcttttttcagaagctgaataatgagcaaatccttttttacaatgttttatatttttgaattttaaaatttgttcagcatcccgagtcagacaagtaagaatgaaatcaaacgcaaatctggcaacagagatgttttgtgactcatgagtaagccattcaggtacagacaatacctgtcaggcaggttgggtgtgttgctagatcactttctccatgctcaaacacagatatgatgtctcgacacccacataaggtatttcatgctaaaatcaagaaatactgggagttccactgagaccttaactttcaggaaaaataaaatcagtgtactcattgaagagtagctataatcactctttggacacagaaacgttgcactcttttttgaaggttctttcttgaagcagacgtttctttccatttctttttttgtcagaaaatcatttcacaaactgctttgagatttaactaaatttcttatttttttttttttaaagttgagctgggactgggcatggtggctcactcctgtgatcccagcactttgggaggccgaggttggtggatcaaatgaggtcaggagtttcagaccagcctggccaacatggtgaatcctcgtctctactaaacatacgaaaattagctgggcgtcgtggcacgcgcctgtaatcccagctactcaggaggctgagtcaggagaatggcttgaacctgggaggtggaggttgcagtgagccaaagtcgtgccactgcactccagcccaggcaacagagcaagacttcatctcaagcaaaaaaacaaacaaaaaaagttgagctggaatttgagcttatttattattccttgaaaatcaagtgtagataccctcgattgctaccatagggagtgccacagcaagagctcagtgagtataatttgtcctcctgtttttttctttgttttgattgcacatttactctatcaataatatgaatgtttcaaattttgtctttgaaatgtggactagcaaaattactaagatactgagtacttaaagttacttataaaataccgcttaaagatatcaacatctgttcatctgtaaagcactctagaagttgtttgcaatttttactgacaactaagtgaaatataaagataaaacatttggatctttgatgagcttcaattagaaatgtttttttccagaatatatcatttttctaatgataaatggtttagattgtgttaatatttctgttccacaattgtattatttccttttgcccatagactttttattcatgcatttcttcaaaaaataaatattatattgtttcatcccaatgcttatatggaggcccaggaggctctgcatcccaacccctctgttttctgtcttacctgccaggtcaggatgagaaatgccattgggcttattgaggcagggatggtgagtctagctttcagtttcctgtacctggctgacatgattttcttcaccgtcacttgctctggctggtatttgtatccatatagaaaaatataaacataacaaaagctttggacaaatgaaatcaaattctaattctattagaaggcacctgatgtcattctcttaatgactttttagagtattactgcacaaataccctccaccagggggtaggggaggaagcctgtattctcctctgtctgcatatctagtactttgctagtggctgacttggtgctccataaacatgccgtttcttcctgacactttcattttcttaagcccattaacagcatgagatagacacatatgggtggattcccaagtcagatgctttgttctgaaactatctttaaaatctactgtagactgattttcagaccattttccagtgatggaaacaggctctccctgtgaatttatgcagccttgtttcccctaacgtttcacccaaaatgaggttagccctggaaattccagtgtcccttagctacaggggccctccactgagaatggcttactcctatgtgtggtacaagtattatgtttgttgcctgttcacatcccaggaaaaatactgatttctgctcctgaagtcataaaagattattcaatcataagccttatgtttgggattatcttcaactataagcggctgcacacattcagcttgttcttcctgactgaagggtccagaagcagacagtctatgggtgggagggtaactcacaatgtcaccagggacccagttccttttcatttctactcagtcatccttggcacaggcgtggtactctgtgttacaagagggctgtttggtccaccagcagcaagaggaagggaaaggggcaatgggcaaagatgacatgtctattggcaaactcttctaaagagatttcccagaggcaggacgaacttctcacccaaaatttggttcagatgttgagactgatgataccatatatgaatccactaagaaagtatggaaaggtttattgcttacataatgatccaaaaatagctttagaatccagagaagagagactggcttggcgtttattgtgggtagagatgaggctggggtgaaggcttttgcacaggggtagaggcttgtggggtttaaatttcccaccaattccaaaggagggagcacctgggccttcttttcagcttcctggatatggaacaaaaggagaagagggagtaatgagatttgaatgcagccagacatcagaaatgtagtcagactctttattgcactgtctcaatacccttctcctggcatcttacagcaggctgagaaatgtggtgttttagtggccacaatggagggctgttagcacaggagtgcaggatggaggtgagcgggggggcaggcagcagactctgccagcccagccatctcgtctttcctgctgacctccattcaaagatgaaaagtgaccttggctgtccacaaggatcaatggtgttgaggtacctggctcacttttgttacataaccaagtccagtgaactacagtaatgtagccttttccaaagcttgaaggagcaagaggaaaaccatgagaaggaagaagagagctaccctttgggacacagcagggcccagtgagtgtgttcagctataaatatgggcatcctaaagatccatcgcaatggtatgtccttctgttaattgcaaagacaaagggaacacacaagctaaaaacaacaacaagaacaacagtaacaataacgatagaaagcaaaacagcctaattctgtcctctaggctggagactgtaattttttccccaccgtaggatactgttaagtttattctagggtgagtgggtgcccaagggaggcagtgagtatggctgaagtcacctggtggcagggtgctcagggatggccacaagttctacacggccctgcaggacctgagtctttagtcagttgggaagctctaccttctgccccagcccaagagggttggggcagtcacggatgtagcagttttcgtaattcacagggatccatgatgagcattgagcaggcttgattctcacacacatacgcagtggcctggtcttcctgccttcggagggtactcaggaaaggcagccagtgggacaggaaactcgaggggtccccatcagccagaatcagcaccatgttaggaatgtagacagggtggacgcactgcaccagaactttggtgtccttggcctggcggtctccacagatggtgatctgcctgagggtctgctgctgggctgagagggcacggaccatctccggcaatgccaccgggacatggtgcatgtgctgggagaaggcagtcactaggcacacacacttgtccatccagtccttgtgactcgtgaagctgtgcaaccagagcgggttgtgggctgacacggaattggcgctgggctctggagactgtaatgttttaaactctaggaggaatgtcctctgaaagattgttcagaagaggaagttgttttccccactggaaggaaaagaggggagaagagtcagaatgattagataaaagtgctttccaatatgttattgtccagagcgtggtgtagaaaaacaaaagtatagtaaaaaatgattctccctttcagttctctctttaacctttctctctctctcacatttttgtactcagatgttgctccctgcttaaaaataattctgcagttgaaaagcaagtcacttgggaagatctgcaagttaaagccctaccaatagttttcaaatatgacaataaatgtctgggtggtgatgaagggtgacttgcagaagcaccattttccattgagaaggtggttattggcttgctattagaggaggaagaaaagatctatgtttatggtgctgatggagaagcattcagaactagctgcttttgtgtttaatatttcagtgaggcaggtgtccctaaaggcatgttgacacttacctctaaggattcaaccagaaatctctttgatttgacatttattttacaactttgatgtttgtgaccactgctcagttcccacaggttgctgtttgaccacgacaaggtcacaaagccacgaagccataaaatatgttcaattcaatagctagttatggctctcggctcagggaccccacctccccaaaaactagcagtctagaggactcccttggcagagaatctgagcacatgcgttctgcgaagcctcttctggggtcctgatttatttttattttttcactttctcccctttattctcttgatgagcttcaaaaaaaaattccattgcagctggcaaggccgaaaaggtacttaatttcaaccacatttttggtaccctaggaaaactaattagaaataatatacagagaacaaggtatggcatagatgcacaagatctttgcaggccagtgagcaaaccaaagatacgagaaatcgtaggtctgccaaccttatcttaaagtaaaaaattgagttacaaacaaaatacaagtgccaccactcctagtgtggagaagtcagcttgggcccatatcccaactttaagtaaagtagaaaacatttattttatgtctgctttgccgtgactgccctacagtggaaacaggacatttttgccatgaatttatcatttgatgcagatgtttggctcaagtttcctgatcttgtcagcaaagttgacgttaaaacattagaacaagaattgtggtttatttacgttttcttacaaggtgtaaatttgcatatatgagctttgtttttattgcagcctcttagcctctagttttggagtgtatgccctattttttctccatgaatagtttgatagttgtacttaaatttatgggttctttctacctctttctacctttatttctccaagtaccagcacattttattacagtgattgctgctttcctgttatttttttaatggccatcaagaaatatagactcccatcgtagcattgcaggtggctaaccccatcttgacctctagacttttctaagtctgcaaagaataaaaacaaggaggaatttgcaaagttcatcaagtctagaccttccttagaggcctaatgattatatttgaagccactctggccagttttcctgattggaaatggttaaaaagtagctaggaagttctgaaaaagcaaaagtggttaagataacaagttaagcattagcaaggaagtttttcttcagttcaagtattaatacatggtctgggctttaggagtaattttacaccagttgtctgttttcctttcagaggtggatggaaagttgttctcaaaatgcatctgagttgttgaatatccattatgttacagggaagccattccttcttccaaaacagttttaatttttatggagtctaagttaaaacaggaacatttattttcttatgggtaaagttcctggaatgctctattacatggatttagtacattttttgaccaaataacacttgaccaaacattattttcaaaattgatctctctttaaaaaacaaaaagatttaaaaatatggttccttttgctgatgagcatcatactttggcatttagtctgtaaaaccttggcatttagtctgtcttcctggagctcagtttcttgaaatgcacatctcgcattcagggctttcatactcaacaggtggtaccagccactggtgttctgcttataataaaaatgatacatgtgtattaatattgctcttgaagttaataaacacacccaaatctggttaatttgttcaaattattgacagattctctgtgatttaccaggattaatgagtatgcaaatacaaggaagaatgcccaggatagagaacatcatggaacatattgtactttattgtaaaataaaaatagccctggacagcccatggaatgcgttctaacagcataatcagttctttactgtggttttcctgccaggcggggagccctgtgtcacacagggtgggtgccaagtgtctggtttgcgctttggtaagatttttctttttcttcctgataattttcaggtttgcagtttctccaagtgcaaaacatccaagccaccctccctctgcagtggagtattgattttgttctagatttctcagcaaaggttgggatattagagttcaaaacacaagtgggcagggtgagcccacagtctctgtgacggggcctgctggacactcccagtctgccggcgaatggcagaggcctgggacagcacggtggaattttcatctcgtgcaaatgaacttggcctcttagatccaggtcctctgctaccaacagtgaatttgttacagtgtgaaatgctgaggcaactacctaaataaatctgggcaaaatatactatcgaagcaatctgggatttccacccttcatgaattatctcacattttagtctaaattgtttaagaatgacttgctcacggctgggcatggaggctcatgcctgtaatcatagcactttgggaggccaaggagggcggattgcttgagctcaggagtttgagaccagtctgggcaacatggtgaaaccccgtctctactaaaatacaaaaaaaattagctggacattgtgatgggcacctgtaatcccagctacttggaagactgaggcaggagaatcgcttgaaccagggaggtggaagttgcagtgagccaagattatgccactgcccttcagcctgggtgacagagcaagactccatctaaaaaaaaaaaaaaaaaaaaaatggctttctcccttgctccctttttgccctctgtccacatggtcccagagtcggtgtttgaaaagcggctttccactgtccagagaggattattcttaacaggctgatgatcctggagcccacggccacacttctgggctctagtcacctctaatccacgttgtgataattggtcattttgttttgtgcaggcaagacttggatgtgcaattttcataccatctcttgattgtttacccaaacagaaaatgtaaccagggaaccagcaatatggtagttatgcacttcccaaatcaacttgaagttgatcctaaatgcacgctgtttccactgctgcttctctgatgcaggttctgccccagtgatagtgagctggggttactgtgaaccaagattgcacacggggctatatgtggaaactccgaccccatggtgcctgccacacactcacacacatactctttgagacccaaccaaaccagcactcagaggcaaagagtttaaagaggtggggctttatccaacattggaaccattttaaattccccaagtagctccatttcaagttcttcagatggcctatgaagatcgataggacgtctttccctaagcccttgccctcgtgcctctcctgacacacgcccagcatctctcttctggaggccttccctgctaaagctctttctgtgcaacttcttggctgactcctccatccccaggaggctctatctaacagcagcctcatcagggacaccttcccctcctgccacctgctctgtgttcccccagcccacatcttcattacacaaactatttgtatgctcacttataagcttaagggaaagagacagtaagctcgtctgggtaggaagtctgttttgtttactgcagtctccatatcctatggaagggtgccgggcccactgtagatgctaaattaaaacctggtaaatgttgaacaaataaaatgattaaatcaaatggtgtagtatgcaaggaagaaacaaagatagggattcaagccctgcctctctacctggctgtgtgacttcagctcagttattgaacttctcttgcttttaatcttcttatcattataattactgagatttgggccacgtttttagaaagttaagattttgtgtggctttttgagctttgacactttaaaattgtttatcttcttttctgattttttttttcctgctgggctgtaattttcttaagggcaggattattaaagatgcatctgtttatttcctgaaattcacaggacaacacttacactcaggtgctcaataatcatttgttggaaataacctgttttgttttttccccagaaagcctgtttcaaaaggtgtattttatagtatttgatctgctagatcgagggttggcaaactttttctgaaagaagtccaggcagtaaatattttgagtttcgcggccatactttttgagatggagtatcacccaggctggaatgcagtggcgtgatctcggctcactgcaacccccacctcccaggttcaagctattctcctgcctcagcctcccaagtagctgggattacaggagcctgccaccatgccctgctaatttttgtatttttagtaaagacggggttttgtcatgttggccaggctggtctcgagctcctgacctcaggtgatctgcccgcctcggccttccaaagtgctgggattataggcgtgagccaccatgcccagcctatatttctttatcacaactctgcaactctgccattttagcctgaaaacagccataaacaatttgtgaacaaatgggcatggctgtcttgaaatgaaactttatttgcaaaaaacaaatgacaggctgcatttgacctgggagctatagtttgctggcccagcactagacggttattgtcataaaataaccattttctaaaaacgaactctttgtttccactgtgtttctgagtaagttacatgagatcatttaagtttcatttctattgttggccatttgttatatgaataaagatttgctaagtgaccctcaagcttgggtctttatttcatttttagattatataaggcttgacccacttaagaaatgtaaccgtctttttatttctcctattaattttttttttgtctttgtgactatcttgtttatacaaactgaacctgagacaaagccgctagtgactgctttttgtggttaaactggtttcgaacccaccaaagtctagaagagggaaagaaagaattgtaccagatttgatgtgttttgtgtaacgtaagccagattgtacctccttctctctctcccaggtctgtatacaacttaggaccaagaggtggactttggtgtcttagttcaagctctaaaaataccagggaagcagggaccacgacacatcccaggcttggtgcagaaacctgacctgaattggaccttaagatcagaatatagatctattgtctttcctcacctggctgttaccaaactaacttccgcatctcctgggagtgctttctatttcatccaggcagtgcccttatctgatctggagtgggtttatctctgggagagctattgaagtgcctgacaggagaggacactaagagtacctccagtctccaactgcctcctccggcagaactgagcaagtcctaaccatgccaaaaacatcattatctctggttccatcttagtccctgcacaccctaggattcaaggactcaagtaagttggggaggggaacatcttttcacccctggaaaaccttgtctcctcccaagccctgggaggggagaactgctgctaatgagatgctggtagttagtcttgtaatttttacagtattatctgcagaatgaatgactaccagcaggtactctgaatctcttttctttctaataagatgtaatcaacgaaccagattgtggccttggagctgaccaaaggatcagctaaaggaattggacacatcctgagctagttaacacatgggtattgtcggtctaagatgctctttaggggctagtgactcattcatgatgtgcaggaaatggcacagacacctccatgaccacagaaggtttctacaggcgccgtcatcacagggtctacaaacagaaggaagtcagagagagaggctcaggggaaggcaaggcggggctggagacctggattctacgtcggagtttaccgcatcctggttctattcccaaagtcctctctgtgtggccatatgcctgattctcagcctggcttcattccagtcatctcaggatcttacaaacaacattgatgtccaggccccaccccagaccaatgaaatcagaatctcttggacattaaaaaaaaaaatgagtgattctttctgggtgattctaatatgtggtcagggttgaggccactgctttacttcattacatcatgacactaaaaatactactggaaagaaaaaaggagggctaccatctgccttccaatctcttcagctgggaacctcttcataagactgtatctgaaaccaggatacgagatccttataagtaattccatttataataacaaagaaagaaaagaaagaaagaaagagagagagagaaagaaagaaaggagggaaggaaggagagaggaaggaagggaagggaaagagagacagagaaaggaaagaagaaagaaagaaggaaagggaagaaagaaagaaggaaaggaaagaaagaaagagagagaaagagaaaggaaggaaggagaaagagaatgaaaggtgtttacagctggaaatcaaacagaactttgcctgacacatgttcatttttggccatttttgccttttttgtggtgtgaaccattagttcagcccagttaaccctgagaccacccacaaagactgaattcagaggtggctgtccagtacagtgattcaaggtgaggcctgtgaagtgagatcaagatttgaatttctgcttctcagttcaccaactatttgaccttgggcaagtgacttaattcaagacttagttttatcatttataaagtaagaagaataatacctgtcttacatactctgatttgttgatatgatagtcaatatgctataagaataaattaataattaaatgacacggtagacataaggcatttaaatctaattcctgatccacagcaaaccttcaacaaatagcagctgttatcatcagagctaaaacgaatcatgtatctaggctagggtctggtttctttgctgttttggataatggcttaggaataagaataatgcccactgaagaagtcttgatttttcttaaagctctaagctcactagagttttttgcgtgttgccaatttcaatcagatccaggagtattggttactgttggcctatatgatgaagattaacttttggaagaatctttctgtggaatgcaggccaaaagaattctgaggctgcttttgatttgctttgagttcgttgcagctaatgtgaaggatgcaaatatttctatattccctactatctgcttggggtcttcaagagatgagttacagtgacctggaggtaacattttaaaaatgctagttaagattagtgttaaaaacacagacaaagtctgaatctctccaatgcttgattttaatttttaaaaaagaggaacatattacaaaggaagcagaatttcaacataatctttagatggtaaattatgttttacattagtctgcattattaccacaatacttgcacctggctggtatgaggagtgtgtgtgtgggttaaagggagctgttatttacctgcttatctatcagactggtaataccaatctcactctgcaaatttaacatcagggatttactgttcataatagaataaatgcatattgagaaccacacttgaacttagcccttctgacaggaaactttcaaagttagaagttacactgagcttgaattttaagagagaggaaaagtcatttaataaaactaaaaaatgaaggatggatggatggatggatgcataggtagatggatggatgcataagtggatggatggatggatgggtgaatggatggatggatggatggatggatggatggatggatggatgcatggatggatggatggatggatggatgcatggatggatggatggatggatgcatggatgtataggtatatggatggatggacagatggatggatggatgcataggtagatggatggatggataaatggattgatggatggatggatggatggatggataaatggatgtatggctaaatggatagatggatagatgcataggtggatggatggatcgatgggtaaatggatggatggatagatgcataggtggatggatggatggatggatggatggatgaatggatgtatggataaacggatggatagatggataaatggatggttggatagatgcataggtggatggatgtatggatgaatggatgtatggataaacggatggatagatggataaatggatggttggatagatgcataggtggatggatggatggatggatggatggatggatggatggatggatggaaagatgcatgcatgcataggtagataaatggatgaatggatatgtaggtagatggatggattgattgaataaaatgctgaagttaatagaatcctctgttactctgtatgcccatatgttcttcatggccacatgtaaggttagccttatgatgaaagattggcatcagtattgtcatttttatttcagcttgtgcctaggttacatgttctcatatgttccccataaacattcacatggtccagtgtgcaactatgaaagaagcttcccatcacctgtgcctcccaatctcaccccactcactgcaatctgaggaagaaatccaacaccaaacaaacactagaaagcaccttgctggcgtgggcttcctgttaactaaactaaaattccatctctaggactcagtgaactgacaagtgttattgcttccaaacttgggctatgttcactccatccaggtgcatttctacaattcaagtaaacattttcactgtaaacttattgctagtaagagcacaccacatcacaaggaacagcaaatagcagacatatctttgcgccttcacacagcagcacagaaattatatctggtacttgattcagtgtcaggtggtataagcacttcatcaacaaatgaagaacagaaggggtaactgagcagcgacaaatatttcgttaagttctgtaaccaagataagagatagattctcacacttgattgctgggaatacacacatcctataaaagccaagaaagttagaaagttaactaagtggcacaaactttatagcttatcagtacaatgcaaggcacttcaggaaaactggcatgataaagcttggtttcctaggaacaagctaattaaattatatttattcaagtaatctaaactatttaactattcaagtggttggacaataaaagaactagaataagactcagaaaagcctagtacctacattgctctccctgggaggtgcagcagcactttgagggcatgcaaattgtttaagatattttaaggcagctcaggatctctgcatacattctagtgaaaacagcagatcttgaaggaactggagtgcacggcttctgtgtcccacaattcaaacatgagaggagatgagaactcctgtattataagatggctttgcacatgattgttcctagaggtgagttttcaggcaaaacagagggagctccctgtctgagtgcaaccagcaggaagaggaccttgatgctggccacctttgcccctcaccatggagctgcattccctgatgtcttctgacagaacacacgtggtgcaggacaattcccatgccttcccttctccaaactgcataaggaccctgggaggtaaactgtttttctcagttcactagtgcaaaaccatctcagataagtcaatccgcttgcctcagatcattgagttagtaagtagcagctctagaatttgaatctatagctaagaccaaacctacatttctcccttgcacccccaatggactttactccttgccagaaagaaagaatataaccatttagtgtcccaaggcaagaattacagcttcggttcaattttgctgttggtgtccacactgtaaaatgagatttgactggcaagataagacataccactgagcaatttgaaaaacaaaacataatgacttttgcccaagagattgcaatgattgtttaaattgataacccaagtactttttctgatgtgcgtactaggtgatatatgttatttactgattgataaatggtaaggctgcacctttagaattactgctgcctactaagtacacacagatttcagaagggaagtaagcagaggtgagttttcagtcataactcaactatcactctgagttagggtgaccacaatggcaaaccaaagccagtggaacagaatggatgacagataggaaatattctccagcatgtgatcaggaataaatgcatggaggtgaaacaactccaggaatttttcttaatgaagaagtaaagaaaacacagtcactgcatgtctagtctgtataggtgtggtcaaacaccaaggaaactaaagactgtatgtttgactttaatttcagaagcctgactttggctcagtcataattctctagcttttattcttcaggtcagacagtcaaggagaagaaaaataagaaaaaccagtaccctattattaggcattctttatcatctctttttcagctggagtctccatcatctctacgtgcacatttgataagctgaagtgcaatgatagaataagatgatcttggacagctttctctttgaattcatttttagcttaatgtatttgttgtggcttctctaggaaatgtttgctgaattagcccctgtgcattgctagggctgataaggaatagtcaagagtttgagttcacaacaccctctttctatactcctgctagtccttcagtgtgaagtcccttagatttttatgacaactgggctgagatctttcactttacgtaacttagccaattcgcattgctcagtttttccacaataactagaatatttggcaaaagggcacaattttgcaatgggaaagctcccaaagtgaaaaacctagttgtttacccagttctgctaataataaatacccaagatgagacctgggacttctcctaggccctcttgcattgatgccaggtagaaggaggggtattagtgcagaatcagggtttgaatgacattcttctctgtggatattagagggataaactgtatggattgatagggaggtggttcagtatgttacaaatgaggacgttatagcctaataatatcactacatgctggagcaaataaagggccataaaacatgcagtgtgtacccagctagctcttccagaggccaagaactaaacttggaaaagggtgaaaggggcctgatctatgctcaggaattgaaatgtcatagcaagaaatatcagtacagaagagatctggaggttcacatgcttcagacagtttgatggaacttggtgatgaaggacgtgccggaatacagcaggtagaatcaaacacctggcctgtccattgatattgccaacttgaaagacagatatcccattggcttggtgatttgtttttaaagctgaaatgtgtgattgatcatcagtcaagcaccaattgaccaattgctaaaatatgaaaatggaaggaaatgtagaatgaatcactacttttgtcttctccagttgatctttgaaattattcagggtgataatcgcattttctgtaatattctatttcaaatattgtaaagtgggtcttggagtgttgggttcaaagtcagtctgttgtaggtaagacgtgtctggccatctggtagagatagggtccacggcacacatacctcacagtctggcctaggagcctccctgtacagttgattcagagttaaaccacaataagacaacaatagaagaggtggggggtaatacaagccagcatgccacacattgatgaatgatccggcgaggctttcaaagcaaggcgggattactctggttgcagtgggctggagaaggtaactgtacttagcagatattgcttttctatttgccagcccacactgtcaacagtggaaaacagtcattatcatatcccttctttgacgggaattgccacaaaatagttcacttggtaaaagcctgtctgaggtgaaccaggaacaaacggtgtgtatttaacatgtggtgtaaggttgcaccaacaataaaggaataaagttcaatttgaataaggcaagaggaaaccggatcaccgttgggttcatgtcagtggttgtttcacagtttctcaattctgaagccatgctgctgatagggacctagaatcaccaactaactccagtagaagtttaaaggacacttccatacggagcccctatagagagaggcgggcacttcatgcacccaacttttaagtatatacattcccacctgacaaagttagattttacagatgccgtggcaaatgtgcactcagtgctaacaaattaggatatcaggcctgtattaatgctttcattttccaattattttttattgcatttaacagctgacttcaaaagagctgaggacacacagaggaatagcgtgacccatcatcgcaatttgccagcgagtaggggatttcttaggatgtgggactttaagtgttaaaaaccagggcagtcagtggaaaatcaggattattggtcaccttacaaaggaatgacttggaggtaacatttttattaagtaagttttgcatttttggataatttttgaaccatctcatttaagaagaatgtggataaaatagcttccatgtcttcctgaggaggaacgctttgtgttgaggatggtgggtggtgggaagatggggaagcctccagtgggaggctagaggttgctttcagctccatttacttctcccaagggaaagctaaaggacaaggggagacaggcgattctataaccaaagccatttttcttgtgatttcttgctgtctaaactccatgaggctaaggctagagttacattgctaaactgtcccagagatcagatcacttggctcttttaatctttacttaaataatctttaattatttgctcttcatttttcctggaatgtcaacaaccctactttgtctccacctatggaaatcttgtgggctgcactcaattgttcccacctctggaaggctaccttcaaactcccaggtagagtaaattccccttcctgtgggcttctagaatattatggtcctataacacttatcacacaatatcatggttagctatttgtccatctttctgctgaactataatttactccagtttaggaactggagggtctttggaactcagcaaaaagaagacatctgatttagttactaatcaaactaaattgacatgataccaataacaaaggtttctattagtaacaagaaagccctgctaggattctcctggcattttgaggaaaagactatatgcataataaaatctcgtgcatcttaaatggaattccacattttagtgctgaaattcacgattttattttaattgggaaactgacaaagtggaggaggatgggaatattgagggattgaggagcaatgattaggggtagtaatagcacctgcaccatggattgcaaagcattctatcactcacaggattaaccatcatagccagtgctgctgggagtcttccccaagccctgtgaatgttctgcactgcttctgagagcccattcctgtgcttctctgtgtgtattaattttaacagcctgctgcccctaccaccatcttcataagattgcccttgggctatgggagccacttccatttccattgcagatgcaggaagccagagcccttgggaaattgcatgctcccatcaccctttctactctcagtcaaagactgatgggcagcatcatgaaagcccagctctcttacctaggatgctattttcactccagaactccctccccaggattaggcagggactgggtcttgtccttgtcctaaaattgtaccctggcttcttcccttcctgacttgctttccccacaccactttgggttcctcctgggagtactactttaataaattgcctgcgcatttttgtctcaacgtctatttccatataatctacctccagacaagattttaattttgtggcttcccaggacaagcttcttgctagaaagacccaaaggcaagtaggtcctcacctctggcctgtgaggtctggaaatgggtacacattatgctccaagactcacctatattccaaggaatcattttcaatgcctctaggataaggatggtgagaacaaactggagacagctggccatatcatgatgcacctgtggagggctctttaagctgctagattcatggaagattctgaggaagttttaagaactgttgtaagcttccataaatagctccatatctaacccaacttaaatagaatttattccaaggtaaaaatattttttccctctcatcacactttaaggttttttatgtcttgattcaagccaagatgaggattggaaacattatagcatttttttttcttttttggaaattattcttgggaaacagttctcttgaaaaatttggttcttgtgaactcttctgcccagtattcagatgtcatttcagatcttcatagaaaaatccagacttctatgtattttctatgcaaatttgacacaactaagagtctttccgttaactgtggaggtgggggttggggagcagaaagaagtaaacacaacttactgaatagtcatttatatttgtttttatcttcggctaaaaggtcagtaaaattaaccatgttcaattatgaaatgattagctatgttatttcatgtaatcttatacactagatttcccactttactccttagaaccagaattgtgaaacaaattttactcattggatgagagagagattgcatggcagaaaatattattttgtcaggattaacagtttgtcctatttcccttagttagtttcagaaatttccagaaatacttagatcattcagttgttaaagcatgcttaacaaagcctggcctctatgacagaagtcacatagacgcgcattttagaatttccccactcacctctcaaccctgcagtcatacatttataatgtctcatctcctttggtaaactgtcagatctgcagcctcaaaatctaattgttgacatatcaccaaatgaaaagtaacaaaaacaggtaaacatcaccaaaatgaagaacattgtcttagcatttaaactttaaaatgtatttctactactctggactcattttttccttccatcatctttaaaattgttataaatgagtatctgctccactgtgtatggtcctgcaagaactaaaacttcccagagtattaaactgtggttaaaattcatgcagtatgtaactcgatgctgagaagaagctacatatgcatatgtatgctcaaaatataagaatttaagaaaaatgtacgataatgaaaaatgcatggattgaaagtgaaaagagctgttttgagcttcaattcatcgctctgtagctgtgtgactttgcacaaatcacttatcttctttggcttccatctccttgcccttaaaatacaactaatcatgcctacattttgatctgagcatggacttaacaacatttctggcagtgttttacaaattgaaaaaaaggtgttcaaatgttagtttattaagtaaagcttaggctggaaatacagattaaatataaggagataattaaagttccacggtaacaaatcatgtcttccatatgtaatcttttgtcaacccacttgacaaatatgcatattttttgagggactatgatgtgccagatattgctggaaagatgtttggtgaataagacaggtaccattgagctctagactggaacacagatggtaaatggaaaagcttgagggcaacttcagacagtgataagtgagatacacaacaaaaggagtcttggggcacggacttggatcaggaccagatcagataaggacctcccagaggaggtgccattcaggctaggacctgaacaatgagtcagctcagtgaatgaaggccagaggggaccattccaggccgaggaaacagcccctgcaaatcatcccacctgagcagctggtatatactcagatcctttaattctcagttttccctctttcatcgttctgcacctctgtgcttacctgttttctatgggacttttagcatatcctcgcgggaggtctatctgattctagactccgggagtaccagctctaagaagtccaaatctcgtgtagcttcttcatcctcctgccctgaacccctgggagcccagtgtcttctttccagggccaccatttatactcccaggctgaaaaggagtcccttgcttccagggaaagaaagagcaaaagagaaggagactgaggcataccatctccactgggaaaacagaaatggaatgatttatgccctgagctttgagtcagcagggagaggggggagaaaataaggaagtctcagcccttccttcctaaagacagaatgacaccccatcccttccagctcccacttagttcaagcacccagaacagcagcagctgcacttggggtgaattgcagagcccagtactctggggagaggaagtatcattcatttccaacagaagcaaagtgttcctcaccctgtctgctctatgtcaaaccagatgccgtggtctggccccaccgacatgcctgggcaggggacgtgtgggtatatcatcgtctcccatgggaaacagaccgtttgcgtctcttggcattgcctttggaccagtgtagagggctctctctaggggaagtgcttttgaaaaacccattccatctcttaggattgaccacgatccccatgcagtctggccgtgagaaggccaggagagcacatgagccttggacgggcctcccttgatgtggtggctgcaagagtcactttgcataggatggacatataaccccattcccgaaagaagcttactgcctctgcttccagagatcttccattagaagccttcttcaaggatggaattctgaccatttctcataaagatgccagactatgcaagaatgctggaactcagattccaacatgtatcccgaagcccaatttccatgatccagaagaaccaaattttgcccatgtctattcagcttatatatatatatatatataatatttatcagggaaagcagggcaatagaaaaaaatcagctcaataaaggggttgagctaaaaacatgagttttcctctgtggcattttgcttaggtatgtttgacataggtatagtctgtatggattcattctgattccaccaggaggcaagagattttgttaatattcatttggggaggagagaggaaagagaaaaagaaaacatgggataaaggagagattgttagaaaaggtaatctggttatttatttatagtttacttagccaaagggaccttaaaatgctttgataagaatggccaaagtttcttcaaagattaactggcattctttaaaaaggcatcagttttcttttgcacaggtgtttggagagcccggactggatgcccactagaatcctgtgctggtttgtagatttccttaagaccttaagacatgctgacatcatggtctcctttctcagattccttctctctttttctctttctcccccactctctctctctgtctctcactttctctcctttcctccctccctccctccctccctccttccctatccctccctcctctgcccaatgtctcccaatctctttcctttctctcttcagttcctccaggtaattcttactcaaacttgtaccaacttgtttttgactgacagtgaacagtgagagagttttcttcattttgaggaaccctaaacacctatctttcccaaggcaacctgtctggactgagcatttctctgacttgacataacttcccatccagccaggagtctgcactcttcagtctttgcaggtaagaggtacacggcgcttatgttaactctggggcatgtggcacgctggaggtatttttgaaaaactttacttctaaaggtaatgaaagcgttgtgattcttttaaagcttatttaaatcatttaagacgcccgtgcttatctgggggaatttacaagtgctgtttgcatgtggaaaacgggattttacttaatgatgggacaaaaaaaagtgttttattcttgctcgtgaaacaatatccagatgtcgtcttgtttgcggtgggtgtacgggggtctagcttgcgggacaagaattactccgacttctctttgcaagggtctgtcagagcaagtttgttgattttcagcgattacatagttctttggctaattctgaagcagttactttcctttgtcaatggggaaatcagtttagattgccgtaaggcgaaacctcgccggaatattttaaaatctgttacctatccttttgagaaaagttatgtaagttttctgtggtaggtgtaaggaatgtaaacgatcctgagtttggaaatattatgaactttgttcatgacccatgattaatatgttttttaatctgtgtataatttcatgagagtttagactatcctcagctaataaatgttatactgggtgaaatttccacattgctcctgtaacgccaacgtttgtctcctctgtacttccgcatttagtcacttgaaggaaataagaatttattgttcaatagacatttcttgacctcataatttcttttaacccacaggttagaaaacttacaacgaatgtagtatttgactgtggaaaactaaagaccaaaaatgtgtaccattaattcaaatgtttagatttatctttttcccctttacctgtaagagggattttgaaaaaaaaaaaatccaagtgattcttaaaattcattttttgcaacctcaagatcacaagcacacactcacactcatgcacaatcaactgttatccccaatcctatcttcttttgtcctcttgtgaatgtttaaacaaatatgaaacaatcggtagtaatagccttaggtgacaaattctctcctatttaaaattgtcctaaaaatcaaaagaaaagtgtcccataaagctataatacatttttaaatatcatcattttgtgaaaactaaatacagtatcagagacacttccagccgattaattaggtaagtaagcacttacctcacacacagcttccccgggcgctgttctttcttcccataccttctagggttttactttttagcagtttttctccttctctgttaatataataagtgaccatccagggaatggcccagaggccacaaggcaagtcttcccaaaatactgaagattagaagagtttaaccaaattcctggtagcagcatgtcagaaacgctcatcaaataacggaacagacctttcttcactgaattaaataaatgtataaatagtctgggggttttacagaaattgccttagttgaactttgtgattctggttgcttaaggaaaacacatttttctaaaacgtcctctctccatgtttccactccttcctcccaccaacagttgtggtcattttacagaaagtcttatttccccaatttcctctcctcacacttctcaccagtgcagacagccagtgttttggggggaaagagagcgagaccccaggctgcacatgccagcaaacctgagaagccaacaaaagcaggtctctgggctctttcccataaggctcagcacaacctcactctgcttctgcatcgaggaaatctcgaaagggctgtgctttcttggggcgtgtgtgtgtgtgtgtgtgcgcgtgtgtgtggtgtgtgcaattatatacctgaataacaatgacatactcgttataagaaaactcaccaatatgtggctttaggcacggaatagagaggcaaagttattcggatttaatcagtacatgtcaaatctttggaatatcctttcctgtgcaatcccctctcatctgtttagagactcaaagcagcccacgaagttttttgcatactttgcctcagagtccaggattgcttatgaaatgtatttgtgtggtggatgcgtcagagtcttagagccaacataagagtccagagactgagctgtaagcatgataaagctgtcaatgactggcccgtgggaatgcttgttgaaggcatatacacctccctaatcattttcttcagtctttaatatgtaagtgatacagctaccgttatttttttccctgcagcaattcaagcattgcaccccggattaaatcatgtatctctaaatatgttgttttaattctttcaagtaaaaataattccacaccgaaaattgtcagaaagccattacatgagttaatattaacttttatgtctgcaaagatgagtttgttgcttattcatgggcaaatacaagaggcaagtcagacagaggttattgtctaccttctctctcttctgtcctttacctttatctcataaaagccacctcaggagtggggcttttggtgcagctgatggtgggataaggccggggaagtctggatctagaacaaagtgaaccaagggtgagccttattctatgcccctcaaggatgcagtgccctggaaggagacaggtctgactgaacacacctggctcaggtaacttcctggtgccagttttgcagacaggtgaaggagcagtgtgacccggtagtagctccagagacaagcaatctaagaagtgctaaatcttccctaaaagaacacaaggagcctgctcctacctttaaaaggagaactaagggcagagagggagagaaactaagttataatttataaataaaggtttataaacatttaggaaatgcaacttctttcttggatcctttatttataagttctgacttagtttctctccctctatgcccgtgattctccatttaagaagttttatttgctaaatattactctgttgaaatgaaagaaaaaaatgagggggtagatatttctgataaaaaggccaggcgagaaagttgaacttgacaggtgtagcctctggaacacgtctctggatgaattcagatgatagtagggggatctccactcatcgtaatgcagctggaatacacatagtgaattctgtcacatgcccagggagaatttcagtcagaaacatctgtgctgttttcacaagggaaaggtcagaactccatgagtagttcatgtgtctgcatttcttttgatgggcattgtgcctcaactagagaagagatcaataagccaatagccgccactatccaatttgaatccagaagttcacacaacctaattccagaatacagtttgtgcttctagatgaaaaattctaaagcacaagcacacaattccagatattttagccactatacaaagatgaatcagggtcacgtgatcatgctcacgtcagaagatgcaggagaaggacaaagttttgcattttggtacaaaacacgcatgtgccagccacccgattcgtttccagtagggagcagttgagtggaaggtcatgtctgcactaccttaggactgaggacctacagagggaacactggaaagaattagcaacagaataagccaggttctgtttgattctgtctctcccaccctgcagctccaattcagagcagtcttaatgtgcagggatccgcatagaaccagccaagcagggcctctcgtagtagcctgaccagaagtcacagaggctgtgtaggccactcattccctcattcagagttcagacatcctgagcctgcccatgtccctgagattacagataacacgaatcctcagagtcaccgctgggccatcaaagaaaaaagagggtgacgcagagagggaacactgcaggggaggaatgcaattcttagggtgctctgaggacccaggtgcctgggtttgggtttcattcacatcctgcttcagtcggagctgccctggtgttgggcggatggctatggaactcatgtgcattttctttagtgtctacactggaggctgatgaagattttatggacccttaagattgcacaatttgggggctttctttagagaaaacaaatgcaaaattaggactgtactattaagtacaaggatttggataggacctgggcaagtgaggaaccctgaagctgaagtttcattaacttcttgataaatccactctgtgtcatacatagtaaagccctgatacttgtctcttgaatgaatggttgaattaacttatgtaaattttagctgctggctgctctctcaataactctgaaaaatgataagcaaaaaatacctatcatgtttatccatatctagtgatcagtgatatatggaaaaccaatcttaatgctatctagaatgtttcttgtttcattggcaccttgccatgaaaggtaggtccttgtactgtagttgaacctttaggtcatatctcagctcaagggtaagatgctatcaaagctgcttttcctatggtagaatatgtgagtactgaaattaactgtgcgctttttccacctgaaaagcccccaacttaaaacctaaagaacgttatgctagttgtgccactagaccctagaatggtattgaatgcatgaataataagcatcttcctgagcagacttgagggcttgccccagtggaatatctgtgtctttggtgagaagccttcctcttttttccttagtttctattaacgctgtttccaattttcaatagcagttaattgtgtcatttcttggtagaaatgctggctaaacccatgcctaccaagccaaataatgttctcactcaatgatgtttacattttcaaatatttgcagattgatatcttgcttcatcttagacctctttgccaaaaaatacaaggtcagctccctgaatcttgctttcttatttcctgagttatccttcatgtctattccaacctttaaaggacaaatttgaaaagtttatcctctgctttgaaagtttatgaaatttgtcatcatttgtactcttcctaccaacgccattctcacatatctgctaggaggtaaagaaaatataatgaatcctggagcacctggctgctgtgactagcatgctctaaatactaagaaataagaaacctgccctgtcttttttatattgtcagaagtttgtggaaagaatttatatatggacagtgagctgtattacatacagacacaaacatacaagtgacaaaagcagtgtgggtgtgtatttagctaggacattaataacaaaactgactgtgtaggtatagagaggctatcccaatgtcaacaacatcagaatacaatggtactgtattttgaacgtcttgtttaatatatttcaaatctataattttgacttacagtcaaaattaaacattaagtgcacacaaaacaattaccctttaaacagtatttttaaaaagtgatgtcatagtgacattgacatctgacatctttttttttttttgagatggagtcttggtctgtcacccaggctggggtgcagtgatgtgatcttggttcactgcaacctccacctcccgggttcaaagattctcctgccttagtctcccaaatagctggaattacaggcacctgccaccacacctgcctaatttttgtattttcagtagagatggggtttcaccatgttggccaggctggtcttgaactcgtgacctcaggtgatcctcccacctcaacctcccaaagtgctgggattacaggcctgagctaccgtgcctggccgacattgatatcttaacgtcactccttaaaacgagttggatataatgtcaaacgacttgattcttgtcaacaggaatgctgtgataatctgattacggaagactcagggtcttggttcctaggccctagggacagaagaaggctagcttctcccagacaggccaaagctgctttgaggagggaaggggaggtgaagtctccactccattgccagcaggacacacctgcctaggaactgggggagaactctcagaggctgaccctatacttcctgtctctggagtcaggggacaggggtgattctgctggtcagaaggcaggagggagtgtcctgaaacacaattgaatttgacagcaaagcactgtctatcctgggaagttctgctggtgagcggagtcctgtgagggtcctggtaaccctatccctgcaagaaataagaaggtctgcactcaaataggttcagaaaacctttcctagtttaggcccctcttgaatcttcacagcaatcattaacattttaaaaaccccaagaagttctgcagcaaagacgttctttaactttgaatccaagttgtacatccattttggaccgcagaactgtccaccacctcctccctgaccacaactatgattccctcctctgactaacgtttcacacaaccccacgggggatgctttggccaactgtgatgggtgtggagtggcaaggcatcgtgcgatccaaagaacatgtgtgatgtccaggctccatttaggtgtaagttgtactactggggcctgactacctctgcatgtgactggccagccttcgggattgcgaagtggctgcttacagtcagccccaaagaatttttttttactttctttctgtttctttatgtccaccttattcctaaaagaatttaagtgaatttacaaagatacatacacacacacacacacaccatgaaataaaagaggaggaaaataagagtaaatgtcaaaaaggccatttgattaaatcatttacttacataaatttgaactatttttaaaaatcacagttgagtgcacacagatccacagtgccagaatcttacttttgagctcaacattaaatatagatcttaactacatctgaacttaacttagcttcctatttgaacctgggaatcaactgggcactcactgaatgtagttttacacgcactgtattttacaattcttttgaaagacaatgtccattttcctctgtggatcttttaaattttatttcaccttttacacccctttatgtataatttgtttatactgagattgtaaactttcttcattggcttagactcaggtctggcactagcctaagggactaatctctggtccatcaggcctgggctgggaaccctctgtgggattccctccccattcccggagatagctggttcgccctgcttggccccactttacaatggcctgcttacttgtcccttttccctacagggctgcaaactctttgacaatggagattttatgtagttatttctttgtgctttcagggcatggcccaaggtattcttcaagcaatatgtattgaatccacaggcactgacatgaaaggcataatttttgctataattacatctttactttcaccatgaacttacatctacctcatcctgcaaacgcacagcagagacctttttatctgaagtcttttgaaaatatgtgtatgtgaaaatggctaactggtgtgttctctcccttggtgaatattacaaagtgatagattggctgctagaattgcgtaagtggggttattaaggagggagacatcttattaaggagtgacaagaaacagggaaccatgtgcttaagatatagaagttgtgtaaacccaacagaggagaaatagaaaacatgcaggttattttggaaagaagaaaatgaagacacttgaaataaaacagaaaagtaaatacggagccagcagggttcagcatgggagtgtgggctggaagtctgattctgaggaagaaaacaaggggaaaaaataaaagaaagaatatactgcaatcccaggctagaaaggggtgatttgatccatggagcagcaaatgcagaaaacaacaaaattagcatcatttcagtctccttcaaacgctatgtctagatctggcttgtgttagcatacctgtggcaataaaggtatttggctctgaatgtgttttaaattttaaattgaagagaattttctaacatttacccattttaaagatgaaatattataggactaaaacttgtaagggccacttttctgtgattacaatcaagcgaatttcattgcagctgggagcagcctatgccagtatatggcatttcagagtctagggctgcataaggatatgtacatttaaacatgaattgtataattatggatattaacatgtctagtccaatatcctgggaatgttccctaaatgatactttctgcacagcactttgcttagttttcagtatctgaagaaatggtctgacttgctagccctgtggttggtagaaatgtatatttgatgggtttttaaatcaactctcactcagattttgaatagtcaggctttaaccctcagtgatcttcaccaagtatattcttgccaagggcttactctgcaggaggctgggtggtccgtcttatgtcgatttagaagatataagtgacatcaaggactcaaggagcctccaggctgctgctggacagaggtgtggataggaagacatggaggtagagaaacagtaaagaaaaacacccaaagcacaagaaaggctgcagtgtccagcagaatgtgatgacattgacatgagaggccctgacaaagttccagggaaagtcagagagggaaagaccagatccctttgggatgactgtaagaggcactgggacatttgagatgtgccttgcagaacaagacgacttccagggtcaggacggggagaagccttcagagcaggaggagttaccatgcaccagcaggagggtgcgggaggtcggcagtgtgcacaggggctgagcttactgcagggaaagaatgggagagtgagggccacagtcaggacaaagctggcagccaacagtgctgagcactcctgaaaggccaggcagggctctaagtatttctttttgtttgtttgtttgtttattatactttaagttctgggatacatgtgcagaatgtggaggtttgtcacataggtatacacgcgccatggtgatttgctgcacccatcaacccgtcatctacattaggtatttctcctaatgctctccctcctctagcttcccaccctgctgacagtacccagtgtgtgatgttcccctccctatgcccatgtattctcattgttcaattcccacttatgaatgagaatatgcggtgtttggttttctgttcttgtgttagtttgctgagaatgatggtttccagcttcatccatgtccctgcaaaggacatgaacttattttttttatggctgcatagtattccatggtgtatatgtgccacattttgtttatccagtctatcattgatgggcattagggttgattccagggcatttgtgttggttccaagtcgttgctattgtgaacagtgctgcaataagcatatgtgtgcatgtgtctttatagtagagtgatttataatcctttgggtatatacccagtaatgggattgctgggtcaaatggtatttctggttctagatccttccatggctctaagtatttcttaatcctcacacaggcaggctttcttgctaacctctttagagatgaggaaagcagggtgcagaggttaagtaacacgctgaggacacaggcttcagagaggggtgaagctggcctttgaagctaggttgtccatctctagaagccacacccttaagcctctgctgcaggaggtgggagttaaacataggcaatgagaagtcattgaatattttggttttctgggtcctgagctgcactttagaaataccagtctggcagtgatgatcaagtgactaattcaaagggtattttgagagactgagtgaaaggaatgaagacctggaccagcatggtggctgtgggaaggggcaggagagacaccggtgcaagggagattcagcaggtggaatctggggcttgcactgattggatacaggagtacagttgcttaaagagggagaggtgagagaatgaggacgccattgttaggaaacaaaaatcaggagatgtagctggatttagggagaataatatgccttcagttttggatgagtcagttctggactgctctcattccaggagatgttggaaacagagactggatccctgaggagatgctgttagtgagcattgattaacaccatgggactctgaataggcagtagggtaactcagaggatgccaagagagaatagaaagatataataaaggaggatgagcacaagaccttggggaatataattacaaaggatggggaagaagaaaaacccaccacgctgcaggagagtgaactctcagagaggcagatagatgagcaatgagtctgctgacccactggtaaccaacagtaggaactttctgaggaagacacagttaatggcgccacccttgactcatatatcagagaagaggagatggagggagttgaagggaagaaacagtggaataggaaggcttggtagcaccttgccaactcagttcagatgaaaagcctgagagaaactgagagattatcatttggctggcagagcagagttctcagggtcctggaagctggctgtcttcaagcctattaatggttaatgtttctcatgctcttttttgctaaatttgacaaacctattccccttcctcctcaaagtcaactgagttattcactcagttaaatctatcatgacttaaaaagtatatgcttagcttggagagggggttacatctgttcttgtagtcacataattactggagacatgaaggaagattccagcaactcaggcgccttctgaacaggttgaatacctggtttttatgagcaacccgcttcagttttctgagaagctctgagtaactacaactaaacaagtctattcttgaatatgtttataataaaaaaggaaagataatgcagttatttgctaattgctgcaatgattaaagcaagatgtttcaagtttatcctttcataagaccagcagccttttgaacacaaacaggatctgacaaagatagtaataatgaaagcgggagaacaaggaaacaatgccagttttcttcagaacaatcggttgccactgacttctaacctacctacagtttcaagtttctttggctgggactatattctggtttttcagtgctgtactgtgattaagccaaacttcagcaaaaaaggaagtgctgcattgtagcagtattgaaagttatgtaggtggattttttaaaaaaaatattacagcctaaattttcttagcaaaagtcaaatgagtaacaacacacagtttggaaacatttggagaggagaaaacaaatatctgacaagagtacttaaaatctgaaaaaaaaaaaaaaaaaaaaaaaaaaagaaagtgggaggagagtgagaaaaagcccctgacaggtaatggtggaaacctgacaaatggaaggtcattctaatgagagaggcggcctggtctcatggaaagagactttggcctttggaatctgaccttcctggatgtgaattccaggtgtgcagactcctggcagcaatactcttgggaaaggtgcactaatgttctgagcttcaatttcttagtacattatggggcatatgggaaagagacagaggtgggctacttctctctccactccaggatgccaccctcccactgttccccaccttccttcttccccaggaccaggctgagctcaaggcttgtccctaaggcagctggtgaaggaaaggttcgacttggtggtagaagccctggactggagtccccacctatgggctgagggatcctccacaagtgattcaacttcttagtttctcacctacaaaaggcagggaaattcctgccacaggacaacaaggaagttaaatgacatgattttttgtgaaagtgttgtggaaagcacttctgtcttctatcttatgaatcagtagggaatgagcattctcaaaatgaccagaatgattcctaatttcctttctaaggacctgattcccttttcatacgttctttttgttctaaaaacaaaacaaaacaaaacttactttgtaaagaaagcctgaattccagagccagagtctgtccgttaaaaactttcaagctttttttttaaacttataaaaggcgttataccctatagccactcaaacttgtataaacaagagttgcaatgtgaaaaaactcacttgctgggtttgcctctatgaacaactattgttgtcaatgcaaattgaatccgaaattacccttgtcattgtttttttctggggttgcttctttcatttctgttaaaaatacacagaaacattaaaaaagtaactatctcctctgttttataaggagaagaagggataaagaaaaagaaaatcaacttggcatgcaagtgagccttgctctggaatttgggtgggtctaggaaaaagcaccgacctcagtggaaaacatatatgggtgtgtgggaaatccctgtaaactataaattgactacacagtgcttaagctggtgtggagagaaaccacaatactctctgaaaccagagaggaggggacagagagcaagttttgcacgaggagagcacaaagtgtccctgggagacagagctgctggtaattcttagcaggcttaactggatctattgaaagtgaccactgtaaaacaccactgttgcaccctggggttctctgtgggatgcccctacttgtatcatgcaggaaccctatggcctgactctgcttcacccacacttcttcccaccgctccccagcaaggccccccgccctgttcaattgctcctgtatgcttccccacttcactgccattgcctttgcagctccaattcctggaaagcattctttcccttttctattagaatctcattatgtagcttcgaagcccttcaaggcctgtcaagactcagctttcccttcccgatggggccttacctcttctacactttctaaatgttatcttctccaggctgaacaaaacctagtgtgtctctttgctactaaggactaatcagatgctgtgtcctgattcattcggtgttggtgtatcccatatctccaatcagattacgagcccctggagggctgacagcacgttggacttggctgagctagaatcagctcccttttgcaccctgagctgagtgcatgcagctcagcatttgtaatcctagcctaatgcaatgtgaaatttattatctctctttttacaaatgaggaaactgaagatcagggagacagtgtgacttgtccaaagtcactagcccagttgcctttcagaaggcatctcactccatcttcaggatgaccccaggggctaggctttcacactttaactcctcctagaaggtcataacctgaagatctgagatttgaacccaagtctgtctggctcctaccctgtacctttcccactatagcatattgcctccctatcaccaaaatgcccaacacgaagttgaacatggcataatatcaaatgaacttgtgatcatcccgttttgtcaaaactaagagaacataaaaaaaaatcagcaaatttgaccagagcagtgtatttatggcaagaccaaggcaaaacttgattctgcattctttgcattatagtaacagactgaaaaggttcataagtgtattcatatttaagggagtgtgtaactgttctacctgggtcaatgtagaattccctatacgttgcatgcatcatcaggaatttcatatgcagcagataggcatacagcctggtttctccaacagccaaaggcatttctgagtggcaacaacactgatctggtgaagctgagtccatctggacattggggagccccaggccagcagggtttctgctaagtggacctttccaaatcctctcagggacaaaacctggttgggcatcttcaagaaaagatgctcttgtaaagttggtgtagctgcttaaataagccccgaatagagtctagtccgtctctctgtgcttttctttaaatttcccttcatagaaagctaaaacttaaagaggtttcagagaagctagtctgaccccatctcccagtatcattgagaaaactgaagctcggaggggctgggtcatttgccggaggttttgcaggacacagaagagcttgttctcctaatgtggcctagaactcttcaccaggcctcctcctatcccaggtggaaactaaagaggaaaagatgaagccaaactcaggcggaagcaacataattaaactggtttatcgtttggcaacagagatcagaggagtgagtggaaagtgaaaatcagtgaaacacttgcagtttaaaagaggcatgcgattcctgcttttcctaagcagttgaaatgtgtttatatgtctttcctggagctctctcattgctaatgtggtcctataaggggaagtcctggagactgagctgggtgtatttgagtattcttctcaatggaaggcaatgagcttgtgtgctacactgcttaggccacacgatcccccaagcctgggctgccagacgtcgccatcattgttccatgcagatcatgcccatcctgtgcagaaggtcactataggaacacatggcacagggaagaaaacgcccatagaaattcacatggtgcttgtctaaaccgaaggcaggtgagatccacccactgtcatgggaagctgctagcatgctcccatttgtttataataatttctccaccgttagaggctgctttaaaaagaaacggccaaaacctgcgatccggtgccacaattgagacagaaagcatgggaccatgacagttttaagaattactaaagtatgaggcttgaccagatcatttttccaaggatccagagccctttagagagaattcaagagggagaatttctggtgacttctaccacctctgaagaattaaaaaacttacttgtgctgctttccaggcctctgtggtagttaattctgcttggcagtttttgttgtcaaatagcttttaagaaatctggagctatctcagatataaataccttaatgatgccagaggactgtctttcacccataaaaactgaagccatgtgccagaagccctcgtggctcaagggctctgtccttggacacggatgagggcagctgggcggtgggaccgaggctctgcctgaatgctcagcttctgcaagctggggtggagagtgtgttcctgcctaccggctcagccagcacaggagcacgtagcctgcaggtgtgggttgtacacaggcttccccctgctgagtcagttccccagatctcttcatcacttccccagatctctgggatcttcagctgagattgggccccagcacctggactcaaggtaaggccccttaggatgcttgtagctgatcaatcagggtagtgcaaaggaagaggggaaaaagccacccagaccttaaaggagatttctggaagatccaatcaaagtgattcaccttaacctcaggcatgacttttccccattatctgctgtttttaatttcaagtagtataaatcttactgatctgaagaagacttctgcttctgaaactaccagcgcttaacaatgattgagccctactctatgagattgcaaataaaaatatattaaccttggcaggaaatcaactgattaatacttataccctacactctaaagactggaacctcaatttatctgcataaacagaggctttgggtataaaagtaaaatgtagttggttatgccaaagactgctttcaatagtaatgcaccaaacatgcttttgaaaatagcaataaactattcatttaggttagatatacaaataagtaactttcagagttagcactaagttttaagcctcaaagactttgatttcagtgacaagatgtgtaaatgcagcggttagaaaaagtacacatactgaggtttctttcaagattatatatagtattattcaaaagtcttattgtatatgaaaagtgacaagatttttgcaatatgaaacaacagtagctagctaatactctagttacctttacagattgtctagttggtcacattataccttaatttttcaggatccaaccaaggcctggttaactcttactggcaatgtttgaaagggatgaaagaggtcctatgcatattactctaaattaatcttagtgcaggaagacaagtcatatttgaataactttattttgtatccctagctactgtcatcctagtatttgaaaagctccttttctcccaatgttcagaaagtcattttccaaacttgcaaatattaaaacctattcatgtctaatacttttctacttggtctatttccatgtcctgtcaatgacctatcaattaccctattcaattacccatgtcacttgagatttctcccaccagaatttaggttgcatattttcacagggcaatttattttaaaatcagaatggtccataaaactaatagctttgtgtgcacagacctaaaagatttgtagtagctctgcagctgcatttttgaacatcaatagttaaacgatcaacataaatgttaaagaagtaaattaactttcagaatttcacgtgtgctctagcattcaccattgaccatgctggaagaagactttgaggtcatttcatccaaccctctcattttacagatgaggaaaacaggactaattgatagctagcaatactaaattatagctcttctaaaactagacagcagcgtcagtaggcttcttcatgtgctcaattactgtatggattccacgagttgatgagcgtgctgtgaccttgagcatttacattctgtggttttcaaatgtttatgtttctaatgtggtatttgtaaacctgggccccagtaacctttaccactgaggctttgccaatcccaactctgggcagcccacctcttccatatgcagcagtgcttgcaggctgttccgcctgggcaaagtcatgttaggtgtaagcaaagacgtgaactagtgttcatgcttgaaaacctcacagagacctgcctgctggctgaatcctttcttcatctcttgttgcctctcctacatgtgactcaaaagctagccaagtttgttccacatccttcagcttgttcctcttacaccaaagtgccataccatcatcccctttagtaagatcacacttctccaatttctgtcctcctctactcctcaataaacaggaagatgctgtctgtggaaaatgcacgtggagctcttgcacacgttttctataacttgtcttccttccacttccccacaactagaatataagcctcatgagagcaaatgccttgtctggactgttatctcccctgtgtctagtatagtcaaaaatagtaggtgatgggtaaatacatgtgcaataaatatatcctttcatctttccttcctatcttagggaaacaaatgtccctttcttttctgtcttacctccctaataacatcagtacttctttgtccctcctccaatattgacctctgaatcacgtcctccttcttgaaatcttgccttcttaattgtctgcttttattaatttacataggtgtccagccatctggctggcctttctccagttcttttgctggaaaatcctctcctcttctctttaatacaggcagcctctaagattgccccttcagttgctttcttcccttggtatttttcttttttttgcagttctcattgactcatatctggtcaacttttacctctaggtacaatgattcttcaatttccacctccagccccaaatttaattcctagatatggacatgcttggagccaacaccaccatgtcacctcaatacactctgcttttcatccaaatcttcctttccatccaggcagcaaactccagagtcctttccactcctgttcaacctttctacttcacatatgacaggtgtgtgaattttacctggtggcaaaccaacgtggtgattctcttgaattcatgtattacttagacaaattcaacagcctcctaaatgatctccttctagctgctctcctccctctccatctgtcttgctagatgagcctggcttcttttttcctgcagaaagatcaaacttttcagtttaacccgcatcaccttttaaaattcattgccagtgtagttcccaatatggcctcatactaacttcagataccccagtgtatctgaagaaagtaatcccagctacttgggaggctgaggcatgagaattgcttgaaccggggaggcagaggttgcagtgagccaagatcactccactgcactccagcctgggcgacagaccgaaactccgtcaaaaaaaaaaaaaaaaaaaaaagcaaaaagcaaatgggaaacttttttttgaaaagatcagaggctccctttttaaaagagcagagctcaggctcttactcacatccctgtgccccaccaaaatattctgattttattgtcctgtgtcagagccaaggcattagttcattttaaaatccccctaggtgaatctcataggcagccatggttgaaagtcgctgataattgataaaccctatggcccaatcaattgggagtacttgaaacatactttgccaccccatagttttgcctgggcaattccccttgtctgtaatcttctttctcctatttttttttcctacagaaaacacatgataacttctttgatttttccagttagaaggaatcagtcctcctcctggaaatccttaataccttttaatatatcatattcattcatgtgatctaggcagaccttgtgttagatatggacaaaatggagagaaataagacaaggtccttgtctttaagcagcttacagtcttgccagctcactggttacacatgaactagtgagtatcaacttttatgatagaagtgtccatgggatactgttaaggcatgaaggagcctattctgcttggcatgataacaatttatgtatatgtcatctcttatatcaaatggtatactttcgagggctaagatcatgcatctctcacctttacgtatttcaaagaccacagtagtataaaatgtttgctgaataaatgagcaaatgaatgatgttttggtaattaggagtcactggggaataatggcagctcttaggaaatggtaccatagttccattcttggggtagggctgggcgtgtccccatggagttcacagaactatgtcataatttcagtactaaattatgtgtgttttacagtttctctcaatcacccattctatgttttatttaaaatggtaataggaatagcatgttagaaactgggtcctgtactcattaacaaaaagaagggagcaacagacattggggtctacttgagggtggagggtgagaggaaggagaagcagaaaagagaactattgggcactgggcttaatacctgggtgttgaaataacctttacaactaacccccatgacacaagtttatcaatgtgacaaaccttcataccctttttttggtaccccgaacctaaaataaaagtttaaaaaattatattttagaatatattcaaaaagtaggatattatttctcaaagaaaacatctgaattcatactttaaaaatattttttaaaacttgaagtttgatcaaggcatttacatcctaggagacaaaagcaatcatttcagtatgcattctagatttatcaactgcatacatattttaggaagattttaagatatttcaatataatatctaaaaatgaccacttaattttagtaaaaagagactcccaccttctggtaattgacaattactatggtctgagagtgtttagattaaaaaattgtgtgtgtgtgtgtgtgtgtaaaattatcacaggaaaatcaatacatcaatagtagcaccaaaaaagaaaaaaaaaaggaaagaaactaggtcctatttttcatgactaagaagttgacaatggtctttccaaattaagactcggcatctttgatttttgtaaacatatcctggagatcgaatgtgaacatttgatggctgatgggaagaattgaggaggattaggggagcacttgactttgccatgattctcaagttaaatccttggacctcttaaagatgttgttgatgaagctgctaaaatggtcaccagatgaatataaacaagtaggacccgcagtaatttccaggctaattttgtgcacgtgcgtttaggggcgagtcaaattaaatgaatgaggagctgatgttcatgtgaaagtaattactctcctccagtagaaatcctaatcctacaagtaactgcagaaataattaatcataactaagaagcaaaccactctcagggagaaaagctgtatctgaacttccacgtgctcttggaggatacgggtgattcacggcataagagtcatctaccaagtcatctgcaagagcgagtgcagcttccaagagggtctgagtcagaacagataaaaggaagttcttcttaactcagaagatttcaacactggggaagctcatttcccacagagatagaaaaatgtgcactataaatcactctcaaaaagcaatttagacaactacgcaggtaatgataaatgcatggagagcactcacatgttttgggttgtgtttttgaccttcattcattctttatagattattaatccacggattaagtcattgactcatttatagtcatgagtcattaaaacttttctggagcatctaccacatgccagcaactgtgctacttagggtacaaaggtggacatggcccaacccctgccctcaaagaacttctagggaacactgactttgcaggcatgattccgtctgcatcacgcatcagtaaacagctatgtgtactgtagggtattgagacacaatgacgttccctctgctcagctcatcaccacaaccaatgtgtaggagcttgctttttgagacccagcggtgctttctataactggaagattccaagtttcctttgcttccatttatgcattcagcagacattaaggccctgctagaacctaggcattggcatgtacaagatgagatatggcagcttgcattccagtggaaggtggtggggtgtgatggatgaagagctggcttttgagtcagactacaatcttaaacattgtcgccactactagctagttgtgtgaccctaggcaaatgctttaacttatctagcctccatttacttatttttaccagcattactctgaagtgtggagttatacatacatgagctgccgacacagtactagttacatattcattctcaactagtggcagttgttggttggatcattattataattaaatatacacaagcaaaacagatatctctagtacactgagataaatattctgggagacagaagcataggcaatcatgtagagaaagccccaaacccatgggaacaggtggagaaagcacctacctagaaagggtaacaccccaaaggatagacatgagaacgctggccaagacaggaggtgggctttcgggcagatggcatggcatcaagtcaatcaatagaggactaatccatctgggcaactgcaagtcattctgcatgacctgaccaggtaacaacctaaggagtggctggcactaaggcaggtggggccagtttctgaagggtcagtttcaggagctgaggctttggtttgtagacaatggggccactaagctgggcggcagagtgctttagggacaccactgaggagggactatgaaggatgctatagagagaggacaacttgagatggggacctcaattatgagcctgtgctgtcatgcaagaaataaagtatgtggatctaaaccaaggcagtgtcacccaagaaagaaaatgtgtggatctaaaccaacgcagtgacagtgggaagggagaaaatggacagcttcaagggatgttggggtagactcggggtgctgagtatttttcagtgcctgagggtctacgggaggaagggagttgccctgggtaatggataatgaagctaggctgggtctaatttggggtgtttgtgggcaatcaaagggaggaaccacacacagttgactgttgttctggcagtcttgcaagagcaatctggaacacaaaaagtctaggcttcatgaactacaaaggtaacatctgaaaccatgggagtagatgcaggagtgtgtctttagtgaaaataaaatagttggagcatggagccttggagaaaatgccacttcaagattggcagaagaggaagaacctacagatggaactgagaaggcatcagaaaagtagaggtcaagttgagagaagagagtagcagcagactgaaatgctatggaaatatcaaggaagataaggaatgaaatgtatttgccagctgagttgtaagtaactctgaccaagtggagtggtgagctgagaggttactctcttggttgaagagtaatcacccagccctcaaggaagtggaagcaaagtatcgcttctgtcctttttaaagctcttctccatatcattgactctgctccccaaagcttggcttttagtgaaagccattctatttagacaaactcattgtctctcctctcaaccccaagacaagcattttgatctctttaactccatgggttttattaccaatgaatgaaataggacatggcacacagagcagacagaaggccattgccaaggtctttcaactggggtcccactctcaattttacttcctgaaagttcaatgtcttggctgaaaacagggctgaagatagatccaaggaagaccactgggaattggccaactaggtttaaactggggaacaactcccctcaagtggcaattttaagggtcttcatcctgcctcattggctttaatccctcttgaacatgtcaaagtggttggaagactgagtcctggtgggccacattgtgtttctgtggactgcggactagtttcagaggaagcacctgtctaacttaaccagggatcacttaggatgaacaccagttacacagtatagaagacataaatatttgaaattttatttgcagccactgttgcacagtgcaagctgtctcagaaattaaggcatatatatagttcaaatgggaccaaagtagtcttttggaagtcataatagggcacacatacatgaattgttgagcagaccttgtaaattaagagattcattgtattcaggcaatagtgtgtgggtgtgtgttcgctttctttgggaaaacagcatttgtaagccactcactcccaacatcaggggcacgtcagggtgagggtatatagaggtagctgttattagtgagaatataagcgacgcctgacttagcactctgttactgttagcactaccgaatctttgatgactaggtgtggtcaaaatcttggtttccagctatgtttcccataaatgaagtttccagatataagccaaatgcttaaacaaaattgctgactacaggatcattttgtaatactgtatgggtgatttataagctgtgtttttttaaagaatgaagtcatctagtggctttgaactttctccccataggtgaagttataagtccagcaagctcctcagtggctcctttctcaacagtcatgtgagagaagccagcctcaattaagccccacggcattcactgatggaataaattaccttctattgtatatgtctagagtgatgcttgctataaccatccatggaagaaatgagaacacagtcactcaaaccattttctgggttcagtaccgtgttgtccagatgaggaacagtggctgcaaaaggccgtttgctatgcagagtgtgagctttcacctccagcctcagcctcgcctgggagctggttagaaatgcaaattctcagacctactgcagaccttttgaataataatttgcatttaaatgagccctcagggaattcgtatgcaagtttaatcagtattggtgtgaagcaatggattcaaaaattatagcctctcgcagcacacacaaggatacttagggacatacatgcacaatatatacatttttcgtcttgctctaacaaattacatatattttatttatttttttcaacttttattataggtatggggtacatgtgcaggtttattaaacaagaatattgcatgatgccgaggtttggtgtataaatcctgtcgtgcaggtagtgagcacagtacctgacaggtagtttttaaaaccaccccacagccctctagtagtctgcagtgtctattgttcccatatttatctccatgtgtgctcagtgtttagctccttctattataagtgagaacatatggtatttggttttctgttcctgcattaatttgcttaggataatggtctccagctccatccatgttgctgcaaagaacatgatttaattcttttttatggctgcatagtattctgcggtatatttgtacaaaattttctttatccattctacatttatgggcacctggcttgatgccatgtatttgctctagtgaatagtgcagaggtgaacatacaaatgcatgtgtcttttggtagaatgatatagtttcctttgggaatacacccagtaatgggattgctgggtcaaatgacagctctgttttaagttcttttagaaatctccagactgctttccacagtggctggactaatttacatttccatcaatagtgtagaaactttccctttctttgcagccttggccagcaactattttttgactttttagtaatagccattctgactggtgtgagatgataactcttcgtggttttgatatgcatttctctagtgattagtgatgctgagcattttttcaagtttgttgactgtttgtatatcttcttttgagaagtgtcggttcatttcctttgcccattttttttaaatggagcaatatgttttttgcttgttgatttattcaagttcaccatggattcattttaaaatatgtataagatataaacacttaaaaggataaagtggaagctacaattgaatacttctatcattttgtcactgtccctgcttgggttactggtgtaccccacattggagacatctggtgtaaagaagcaaacagagccgaaaggaatcttagaactctttgtctatgatggtcagtgtactggggaacatgaaatacacagaggaagtaatttgttggatgaaattgaatatacttatgtttgcccatagtttttatcggttttgtcattttgagagatgtacaactaattttctcttcaagatagaacattgtggcatattctttgtgctacgaatcagaataggaagacgaaatctttatttctaattgaattgttcaaatcagtgaaatattcttcacccgaacaatgtgcctagctgtggactggattcctctctgggattcctctctgacctagaacgttgggcatcataaccttaggcaagtgacattcttactaaatcggacgctgagtccccttgaatggcatctctgcccaccgtgtgcctcccttaaacattaagttcctaccacatgccaggccttgtgtttgccactcaggatgaactactgtgcccagtctatggggaaagctaaactccaagactgatcattacagcagcacagtaagtattatcatgaggtgtggacaatgagaaggcagaagagaggaacaaggtgaacgctacctgcatgctggaggagatgacatttgagcggggcctcgagggatgcgtaggagtttaccaggcatagagcaaagaagaaatatggaataaaggggtcagcctaagcaaaggtatagggcaggatatctgctttatcagcagtatctctgggtgaagtgcaaactcttctaattcagtcaatgaaatgaagccttaagatgactgaaaactaggttcttggatttgtgcaatagatatttggaaatatctctgagagtaaatgatttcataatgtttggccacaacactgtgtggaaagtttctttgtgtaatataatacagaaagtacttctcatttacagtaaaatctggaatacttggaaatggtctgtgctagggaaactgaattttcagattaactgcataaaaatggaaaatctggttgaaaaaccttcctaattttgttttcctttagagagataactgctgttaatattttagaggtgttttattttgatcttacctagagagagaaacagagagattaccctgcatatttagctgtatcaattgccttttaaaaaacatatttagcattttttcatgatttttaaacactgcataatatttcagcctatgagtgttttataaatttaaaaccattcctatattgttggtgactcagattgcttctaatgttttaatatcataataaatatagagaacactcttgtacattatcctatcatacatttcctattaagtcttaaaagtagacttactgactcaagcagtctaacataaatagtttaaaactttgagtatacattgtcaaattactgcctccctcaaaaaagttatgctagattactctatcggacaccatgcaggaagctcttcatttctgcaaactcgtcaatgtagaatgttcacatgtcttttaaaattttcggtaatttgataagtgaaaagtgaattcctggtgcctttgtgtttcttggactgatggtccctcctcagtctcctttgcctgtatctctgactctgcctggtcttaaggctactcaggctcagtctgggttgctgcttccacactactgtctaagggggaagctcctgcactttcatggctcaaattccactcgttggcttatgtgctaaaggcatccctcctgtccaggtgtctctgttgaaggccaggcccatctgcacagaccctagtgcttacttctctttaggtgtctccaggcagcctccagtgcacaccttcaaacctgcaccccagaggtgagatcctccttctgcatcgggattctgcacaagcgtgagctccatgctggtataacacccaaacattcaatctgggtgtcccataacatgtgcataatgttaaaattacagaggaagatccagtgtcctctgaatcagtaagatagcctccgcccaccccaacacacctcatttccatgccaggaagcctggagtcatcggtgagacctcctcttctctctgccttgtcttcttaacatccacctgttggagacgcctgttgactctgtctgggacctgtcactcagagctcctggctagtagctctcaagctacaaacaccgcccttgtccatgcatcagtaatttcaactcagattactgaaagtgccgattaaacagactctcagcatctatgtttgactctttccaatacattccctatgctgcgtttaacatgatcactttcaaaagcaagtttgatcctttctcttccttgaataaaaccccaagatactccttgtgctccaaggatgggggtgacggtcctcaaggagcccacaaagccacatgcaggggcatggcatggctctgcccttgctcctacctgacactgcttccctctcgcctactcaatatcctcctcgtttcctggaaggtgccaagctccatgctccaactccagactaggacatgttatataccccatgtgctagtctctcatctatccttgactttctccccagttcttcccacaaatgtctttaaatcactcatctaatgatgtatttaatgcctcttttccctgttttcttgcaaactacccaagagcaaaaaccaagtcactcttaatgcttcatcagcagcatcctgtgccatgcttagcacatagttggtgctcaataaattcttgccacacaaaccaataaataaatgttaaagtgttgaaatgtcttttcaccttttcaacattttttgaattgcgtttctacacacgttgcccacttacgagaatgaaggctcttgttgatttgtgaaaactttatatgaaccctctgctgttcatccgtggtaaatgtgattccttttgataagtcgtattttatgttttatttgtcgtatgcatatgacaataacagttaacacttgtgtaatgattaatactaatcattatactaatcatacgagcaggcagagttttatggtgctttatatgtttttatttcacgtgaccctatgaggcatagaaatgatcatcatcgccattctgcatatgaggaaaccgagtctcaaaggggttaagaaagttgtccaaagtcacacagctggtgttaacagaagcagggtcctgtgctcttaatctttacgctatactgcctctgaagaattgtttaattttttttaagtacagaagagataatgttcaacctgacttttgaaggacaggtgggagttaaccaagaaagggagaaaatgaagaaccttcaggaaggaattcatgtgccagatgtgggctgagagggcacccagctgctcaggaaggggcaagtatatacccaggctctgttctgaggtgaataaagccagagagggagcgagagccagggcttaagggtctttttggttttccaagttgttcaggatttgtcttgtcagcagtgggagataccggaggatttatgaaagggagtattgtctcaattagtactctagatgagtaagctttgtctttcctggtaagaattatcttgaaaccatggcaatataaagttgcatgtgactgagtggtatattaactgtaaaaatccaccttcctggctgggcgcggtggttcatgcctgtaatcccagcactttgggaggccgaggcgggcggatcacgaggtcaggagattgagaccatcctggctaacacggtgaaacctcgtctctactaaaaatacaaaatattagctgggcgtggtggcgggtgcctgtagtcccagctacttgggaggctgaggcagaagaatggcatgaacctgggaggcggagcttgtagtgagctgagatcatgccactgcactccagcccaggtgacagagcgagactccgtctcaaacaaaaaaacaaaaacaaaaacaaacaaacaaacaaaaatccaccttcctacttccgagaagtgctacagtaaggctatgaagaccaagcattatgtatgtatctgagctgttttctgttatttccccctctgtttttatgtcagaagaaactgtaccattacttctagagtagaagatgttggaatgtctcctcattggtcttactgttccaatcacgtgagcaccaatgtaatgttcattactaacattagtgcctgcaagaatatcctactggaaagggaattagctgtgattttgttaagtgtccagccaattttcataaaagacacagtatctgagatggctgttaaacatgtcaagagattgtgtacgaggggaataaatcaaggaagactctataggttggtctgattctgtgatattaccagaattactggtaatatctacagcatttagaaacttcatccacagtcagatttaatcccagggctatgaagcctggagaatatatgggtagaactcaggagaatccacgatctcacatgaggagaaaagaacagcagtttattttagatggcctctaactaaaatttgtattgagtgtgtgcagcaaaccacagatgtactagctgcaactgtgactttgtcatagtggaaatcacagacatttcaatatcacattccagtcatttcagagaccttgaaataacattgctgctcaccacaccttcaaaacattagctctgatttaatgcttggaaaagtataattttgttttttcagtactgtaataggtgcattttaatatcattggtgtcttctgtaatctttgtgactttacttttatctgtttaaacactttattctgagaaggcaggcatgtgtctcactagtccaccaaaaaagaccataacataaaatgttaagagcccctgagctaatatcttaaaaatgagacaaacttcttagcttttctgacacctctggtaagccatgcatgaaaaggctgcacccccatcccgcagtggttagatttgttttcagagtttttagtactgggaaaatctggattgttttttttcttctaagaaggatggctttacgttaaaccctgtctttaagtttcttggccttaggaatgactcttgagcataagtttgcttttccctagggatgccagatttagcagatttagcaaatacaaatgtaaggccactctgtactatgcaaatctatagatacatatatgtaaatagtacatatgtatctctgaatttcaaataaacaatgaataattttagtataagcatatagcaaatatagcatgtgacaggcttatactaaattatttgctgtccatctgaaattcaaattcaactgggcatcttgtattttatctggcaactctaaaaacaccaaatttgggccaatagtcctccggctaattaactacagatggttagaatgtgttttcttacactgtacagtgatggaaattagttaactgccaaatgtcttaatttttgattgaatgtgaagatatttttaagtttgaaattttgtattatcattcagtgatcacagagtctgctttcaactttgggacaagcaaacaactgagaaatactaccagtctttaaagcaaattttggtataaactgtgttccactgcgatacagtttctatatcagagaaatgtggtcaaaatgtagactgatagtgagacagaatttcaaaactttttgacatttgtcccattgttaaataacttgtttttttctttgttttttttttttttttttttttttttttgagatggagtctcactctgttgcccaggctggagtgcagtggtgctatctcagctcactgcaagctccacttcccgggttcacgccattctcctgcctcagcctcccgagcagctgggactacaggcacctgccaccacgcccggctaattttctgtattttttagtagagacagggtttcaccgtgttagccaggatggtctcgatctcctgaccttgtgatccgcctgcctcggcgtcccaaagtgctgggattacaggcatgagccaccgcgcccagccataatttggttttaaatcaagcacaagtcgtaatttccattgcctgggatgagattcatgctaataactaatatgaatgccaatgaagataagaattttacctttgcatgcaggtgaattacatcagagcccattagtcatcaatttgtagagactgacaactccacatttatttcaaataaaagaaaatgtagtagtcagcatgaggccagaaaacaagccagcctgaaattgttacccatatttataaaacatactttctatgtttccgtgccttcatcgtagtgcaaaatattataaatgtgaggcaaagaaagataaatgtgagtggtaaaaattggcagactcaacatcttagtgagagagatagatttacttaagggaaagtcagtttggaagtattgtaaattatataatgatatggcataaaaaggcatgatccagtctcaagcatcttcttatgtctcacagaaacaggagttaagaaaaccagcatcactgcttacttcccacgtgtcatctcctgtgaatgctccaaccatgtccactttgaagtttcattaaataaaacacattaagccgggcgcggtggctcacgcctgtaatctcatcactttgggaggcggaggcaggcagatcacttgaggtcaggagttcgagagcctggccaacatggttaaaccccatctctattaaaaatacataaattagccgggtatggtggtgcatgcctataatcccagctcctcgggaggttgaggcacgagaatcatttgaacccaggaggctgaggttgcagtgagctgagatcgcaccattgcactctccagcctcggcaacagagcaagactgtctcaaaaaaaaaaaaaaaaaaaaaaggtcaaatacttgcttctctaccagtattatctgcaaaaacagaagccttccactctgatttataccacagtcagacaaacccaaacgctgtggatttccttctccttaaccaaatggtactgttttgagccatcttctcctctgttgtaggtttggactaatccagacaaaaatagtgagtgagattccactagcctgttgaagaaatctctttcctaaggagaaaattgggaccaggagcagtggctcacacctgtaatcccagcactttgggaggtcgaggcaggtggatcacttgaggtcaggagttcaagaccagcctggccaacatggtgaaaccccatctctactaaaaatacaaaaattagctgggtgtggtggtgcacacctgtaatcccagctacttaggaagctaaggaaggagaatcgcttgaatctgggaggcaggggttgcagggagctgagattgtgccactccactccagcctgggcgacagagacagactccatctcaaaaaagaaaaaaagaaaattgagcagtgcattacggaggctgacacagtacaattcgcctcctcaccccctccacactcacttccagacatcagtgttcctgttttgccagtcatctcacaacaatgcatgtccaagccacgctgtgattagagggagaatatgcttattacccaagttcttcgcatgttggagcagggagaggccaagggtggtaaaccacaggaaatttccatttgccctccgctgcggcactctcactctatagggaagttagttgttattaggtaataatgttcagcggaggttggtcactcgtaacaacagacagatgtgtaatgttttatttgggttagccagctctctcacaaataaagggcctgaaattaaactgtctttatgaaaatattcagtaaatgatacctctggcttattccagtgctcagattctttgccatggaaaatggcaaatgagtcccctgttgggcccggaatctgtttaaacttgtctttgtcgagtacagaagggttgatgttctatgagattaaaaaaaagtttttaaagaattcgcatcgaggagtaaagggaacaacgatgcaaaccacatttagagatggaaaagaattttttttagtacttatggaatttcaaacaataataatggaacagaaacataggaaaaaagctacatatctgaccacagaggcaaattgcattattacatgctcacatgcaatgcaaatgtggattggtctgtaaaggaacactttttgcttttctaatgtatagtagggtgagaggagcacctctccaatttgccaaggcatcactagcaaactccagctaccgaattgcttggggaaattgagttcttttgaagacaggttcttgggaactgtaccccaagaacttctggttaagtagctcaggtgtggagcctgagagcctgcatttctgacgatggagatgctgcggttggatgaggggagaagggtcacactattctataccaccctgtttccagtagccagtgagatggataactcatctcaacatagagtgtgaccacgaagagagatacctacccgtaaaatggactaagattcacaaaagcttgtttccagctctaaccttgttactggctcagtaaccttgaacaagttactcaaactttttgatccttttatctccctagatataaagtgtagagtttagaccagatcagcactcctcagtgttctcaaatgtcataaaaaggctaaacacacacacacacacacacacacacacacgtatatatagctacagttaagcaggttttataactgtaggacgtctcagaaactgtaataaacaaatgtgcaatgtggctctccaaagagtgaaaacaatggggtgtctgggggctcagcttcagctccagtaggcaaatccttccaaaagtatttaaccacaaattcctttatgtgtatggaacacctgaatcacacacttcagcaagagaacccctaatgtcctccagccttaactttcccatcctagaatctaggttctccccacagtcctccaatgttcccagccaggccaatgctaaaagcttcccttaatgatacccattatccaaggaagaaacctgagagcaattttctactacctgtttgcttttttccagcaattctcaactttttgccaagacattacacccgaatttctatccccaaggaaacattttctaactaaaaactccacctggccactgcagtacttatatatttaatcccaatgactttctccattcctttgtttgaaagtaatgagactaaattttagacaatctaatttcttggcttattcattttctccatattccagataacttttaagtggtgaagagtataaatcgtggttttccaagtgtagtctaaggtctaacagcatcggggatatctgggaaattatcagaactacagaccctctggctgcaccccaaacctgctgaatcggaaattctgaggtaggacccagtcatttgcatttttatcaacccctccaggtgattctaaagcacactgaagttagagacacagtgttgagatcagaagcatggactatggattccaacataccttgtgctatatcacagttcctttgtctgaaatatgggaataatattagtacttacttcagagtctatgtgagaattaaattaatatataatacctaatatcaggcctggcacagggtgagcaatgagtcaattaattacagctgcttaatctataatggatgctgacgcgtagtgagcaggaacttagctttgtcacactgcaccacgagactcctttgcaagctaatgctgatgatggtggttagataggagtgcagccgtgggagcagacagagctggtttgctcaccaggtgctccatgtattagctttgtgaatgcatgtaaattatttaatttctctaagcttagtttcgtcacctagaaaatagagaaaataatttctccccaaggtaaagagagggattcaataagataatatctataactgctttgaaaagtgcctggacccttttaagttgtcccttcccaaatgaaagctatcaatgacctaatgacagtggtacctgggcggcccagtgtgtctatgtgattacagatcctgaggccactaggtccttaaacttgggcttcttgctccacaaaatattagaatgataggatatgatacccttacaactttccctaaaaagctatcttgtcatgataaatgtaaatattgactcagaagtaatcaaaagataattagtcaccttttctatgttgttcttagggataaggcaagccattcttgccattacaatcttgttgaatttgggttctttttgtattcagtgttgagtcatagaccaacattcagagtttacattaagactatttcacaactcagttgggtgcagtggctctcaactgtaatcccggcactttgggaggctgaggtgagcagatcacctgaggtcaggagttccagaccaagctggccaacatggtgaaaccccatctctactaaaaatacaaaaattagccaggcgtaatggcgggtgcctgtaatcccagctgcttggaaggctgaggcaggagagtcgcttgaacccaggaggcagagattgcagtgagccaagattgtgccactgcactccagcctgcgtgacagagtgagatgctgtctcaaaaaaaaaaaaaaaaaggaatatttcagaactttatatctttcctttaaatgcagtaccttttaggtcaggcatataatcctaagataaaaaaatatgtattaatcgtgaaaatgtctctgtggtcaggtttcactaggttttgccttgttaacaactctaagaactgtgtggcttacagcaacaagaattttttctcacctgtgtttcaagtcagctgtagttgaattatggctcagttccaagtttccttcttcccacttaccagaaggaaggaacagcccaatccatgacccacccacatgcaaggcaagccatgtgatgatcccgacacctctcttcaggcatggtgtgggttactgctgttcacactccattggccaaagcaggtgacagggccacacctgacacaagggagtaggaaacacacaccccacccccgctacgcccgggcagggaaagtcccagtgaaggatcctttgtggaaggacccagccgagaggcacagcaaatagttgggagcaacatacatcaaccacaacctcccaaattgtcacagctctaccaatagtttccaagttcaaacacatcttccaaacacaggtcactgagaggaaactagcttccaagtgtgctgtaatctcaactggtgcttcccctgaaatcctgataattcccctggaggagaatgagtgattcttcagcctccaaggagctgtcattctttctgggccatccttcagtcctcagtagtctaaggaaaaagtgcttttgcagaaggaaagtagaatttcctcaggagatacaaaccgaaggattgccctctggaatctgctgagaatccactttgtccaccttgcttgttttcaatgaacatgtctgtttctgaggccacttggcaaagctatctgtgcccttggctggtatggatgagttaaaagctggactttgtacagtcagaccagcctttaaagcggatccttcactgctgcgtagtgtagggaggaaaatggcccaaggccaaggccaaaggtcatggtgcatgtgctcctgtgaccacagtcgagggagcccagggaggagagctaagcctttattctcaattgttttaagcctcctgagctcagtgaaccccaagtagattcttgtcaagcattttttttctacttaatatttaaaacggtgatacttaaagtcaaatttaatccaggcattttttatttctggacaaagagatcattgaaaaattaatttgtcagaaatatatgacacgcaaaaaagcaaaaagctttttaagtaacttttcttacaaacaggaagctatgttttttcagagcttaaaagtgagatccaccacaagttaattttagtctagaaatccaaagttactatttgatttagatttcactctttatgcctcatcaccctggttaaaagacgtggaatgagctcgctgaaggcctagttgaggaaccccggttctggggagccactgtctccccatttttctgtaagtgagaaatgttttttctaaggggcctttgctttgttagttcactgtgaaacgcagaatgaagttttctcgagatgggcaaattgaaaatcttcaaaatctggcctaacagagctctaagttttaaagacatcaatgtctttaaacattgccatcatcaacatggcaatgggtactacccttccatttcccattatccttgctgtgtccccaacactggaagtgtagttctccatatagctaagtacctttttcaatgtgccttctgttccattctgtttcagagtgtgtttattttctttcctttaacttcagaaaactaatgctcacagcataagcactcagtgacctcagaccattaatcttttactggtttgaagtaggagaaagtaatactgacctatccattcaatagttgtaagaacttcacttaggtagatatcgccattctaaaaattgcaaccccaacccacaaactgaaacgatataacaaaaactgcagaaataaacattatttccagaaattaaagaaaactgttaatggtttatatgaaatattgcttagctgggaggattaacccttttctcatttgccctgagaatactcactggcagcacttgaggctgcaatatttacctggagatgattttgccacacagtatattacttttattattattttcatatcactctagtatatcaactttggaaacaaaagacaacattctatttagagcattctgcttttagtagtggtatttttatttacaaaatatagtaattcttgatcgctgaaaatgtcaaatcctggaaaacacagcattcctacacatggtgttaacattggtctccaacagttgttggccagagattcatttgatgaatccaatttttccgaaatagacaattctgatgattcagatgattctgatgttagttctgtttagaaataactccaagaacaatttttatgttttactttcacattgaaaatcaatcagatttgcttcagcctcgaaaagcatgtttatgtaaaattaagtgagtactggtggcaagctgcacttttttttttaatgggaaaaaggttaagataggggaaattagaagaaactattcttctctcattctttgtgtttttatcttttggaaaactgttattgttgcttaccatgttagaagttaagccaggtctattgaagaatcactaagggaatataacctaaggcagtaacataaaattatatgaaataagagtatgtatcaacactgattcaaacttcatgaaagaagtctgctgaggaataaaattctataaattaagagcctatgatgaagtgcaattcataaagcctatgggtaagattgatgggcacaaagaagattctgggtcttaatagagcaatgacaaagaggtcatttgccaaacatgctgtggccacactggcaggatccagcctgtaagaggatgcacaggttaattgggaatactttaactataagagagtaataactgtaaataattggcagatcagaagaaacgtaggaagtataagtgtgcctgtgtgtgtgtgagagacataaaaatatatggatgtagacagatggatgattgatagatagatacagatcatagataattgataggtaatagatcaataattgacagatgatagataatatgcaggtagatatttagaccggtaataaatagatagataattgatagataatagattgattggtgatatataataaatgatagattagagagataattgatagataatagattgatagaagatagataatagataggcagatagcttaggaagaattattttcaaaaagtacatgcaaaagaacctcttgaatttaaaggagattacatgaaactgtggatgtttaaggggattttgtggtggactgacaggaaccctgggctagcttccaaagactttggaccttgttctttctgccaggacccagctgtgtcaagtgggatggttctgacaatcttttccactctaatgtcctatgactcaacagtagcaatgcatttccacaggcggtaaaaatattctagactcttcccttccagcgctcactgtttacttcctctgcacttccccttcctgcctccccgtgtgccggtcagttcatagcgggcctcaatgagggtgggttaaccctctctttccagggtgttttgctacggagctccctccaggggctgggaactgtgtggtgagggctgtggttggggttcagcttccttcttaaatcgttccttgaacctttaccctattctgtgcactgtgccgatttccagggattggaaggtaaatgccactgcgtaactcttagaaaatcatcgggggtcagttttactggggtgcacttggtaaccatctatgaatccatgtgtccctctttctttcaggcagtagcagaatcccatggtagccaggtgggtgaaggggagcgaggacgttctacctgccttgaagaagacacctgacctgcggagtgagtgaccaggtagtagacggttctgagggcatcacacacttgagggagggaggaggacagagagggccatggcaccctttgactgctgagtgccagctgctctctttcccactgagaaatgctgcccccaacacacccagaggctctaggtcttgtcctgtgatttctgtccaccaagacttgataggaggtatgatagatgccattaactccagcactatatacacaggactgcagcaaaagcgctctcagcagaaagaggaaacagatacagttcatcccaagcctggcttgctgcccctttgaaagagagtttcaaacagaagcttcatggtgctgccttcataaaaacagggccaagctttccagaatctggcagagggctgagtgcccgcaggacacttgtgtatcactcacactggaaaacttaatcctctgtttttatttcagtggattgaatggcatgcagtttcctcagcagcttaaaaaaaatgcatgcagtcacttgcagacaggctgcatttgtctctgctggtgctcatgttacaagtttgtctgtgcatttgggcatgccagaatggcgtttcatttccaaacctttattgtggtcactttcctcttcgttacactgagaagtgttgctgagggtatagtaaggccctagttcatcaattatatcctgtacttttcttctaacttgatcccaagaacagtggaatttgcttcaaggtaaacaaattttgaataatttatggcccttcttttcaacaaaaatgaaaacgtgactttctaaagaaaagtcaattacaagggggcatttagtaaataacacactcttaataaagtaacaggaaaattaaaatgcccagcagacccattgcctcctgaacaggtgtttgctgctaatggatacagtttccatttccttgaagggatttgcccagaggattactttcacaacttctattgagataatactgctctaacagaaagagcaatgcatgaatctgtatatcagttccttaataaaagggaagatttttttagttcctaaaataccaatgaggtgaagaaaaacatgccacccaggtaaagttactctgtaatcacccgcattatctttttcaaggaatgtgggggaaatttatgtcagtcatcaggcaggtactagaagatgctaggggcctcacagacagcttgttcccggctgttaacatggagcagagcgttccctggggctgagcatgggagcccagcacttcttataggtaggtctttcctactataatattagatgcctacacttattgactttttcatttgctctttaaaatagatttcttctgctggttctgcttagttctaaggagtaaggtagaattttggtgccatacctaaatatcacgtctaaaatgacattggtagcacttttccaagaataaccagcatattgatcaagccattaataaagcctaattatttgctttaagaatgtttttggttgtttcaaactgagttttttccaaagtcataacaaaactaggagaggctgtagattcttaattattcattagattagggggaaaacgaattgctattacaaagaatatcatgcaaaaaataggttttaaaaaatgcattactactgagttttaaaaatgtatactaacattctccatatcaagaactgtttcatggatggtagattttagttatagcagtactggacttacactcagtcaaataattttaaattttctataattgggaatacatggtagctgaatataagcaaacatattactctatgaaataaatgcataagagtttgttatcacaaaaaacagcataacattatttttttgaaacacaaggctctgttttaacactttaccttgtttaatagtaacaaaacccctgaggaataggttgtattgccattttaaacactggagagcaaaggtccagagaggttaaatagctttctgcaggtcacacagctgatgaattgcagagtcagcatttaaccccggtctgcttttctgcaaagcctctgctcctcactctaccctaccgaccacctaagtatagatcagttaatcttgccttcagaattctcctttcttgtgtacttccatgtacattcatacttacttcacatgatgattctattttctggaagttccaccacatatggcgataatgaaacatctttgtcatttctctaagtgtttccagagcctggcaatggatgccattcacatcggcatgtccagcacccccctggtgaagcacactgctggggctgggctcaaggccaacagaccccgcgtcatgtccaagagtgggcacagcaacgtgagaattgacaaagtggatggcatatacctactctacctgcaagacctgtggaccacagttatcgacatgaagtggagatacaaactcaccctgttcgctgccacttttgtgatgacctggttcctttttggagtcatctactatgccatcgcgtttattcatggggacttagaacccggtgagcccatttcaaatcataccccctgcatcatgaaagtggactctctcactggggcgtttctcttttccctggaatcccagacaaccattggctatggagtccgttccatcacagaggaatgtcctcatgccatcttcctgttggttgctcagttggtcatcacgaccttgattgagatcttcatcaccggaaccttcctggccaaaatcgccagacccaaaaagcgggctgagaccatcaagttcagccactgtgcagtcatcaccaagcagaatgggaagctgtgcttggtgattcaggtagccaatatgaggaagagcctcttgattcagtgccagctctctggcaagctcctgcagacccacgtcaccaaggagggggagcggattctcctcaaccaagccactgtcaaattccacgtggactcctcctctgagagccccttcctcattctgcccatgacattctaccatgtgctggatgagacgagccccctgagagacctcacaccccaaaacctaaaggagaaggagtttgagcttgtggtcctcctcaatgccactgtggaatccaccagcgctgtctgccagagccgaacatcttatatcccagaggaaatctactggggttttgagtttgtgcctgtggtatctctctccaaaaatggaaaatatgtggctgatttcagtcagtttgaacagattcggaaaagcccagattgcacattttactgtgcagattctgagaaacagcaactcgaggagaagtacaggcaggaggatcagagggaaagagaactgaggacacttttattacaacagagcaatgtctgatcacaggggcgccatccaggtttaaccctgcaagctgtttccacatcagaactcccttcaaacacaaagattgctgtgaaaacgaaaatgtgtagacgcactctcaaaaactgcacggacatacaaaatcaatcttttcctttgatcttgtggctaaaccagcatttctgtgtttgagagatttcctgttaggtgcttcgtctgaaagtgaactctcataattcaaattgtataaaataaagctacatttctaagagcttggtgtagggcaattggaataatgtcctgttagataaacagacatttagcaatcctgacattaaaaggaaatgtatttctatacaagattattagctgtaatacaagatatttatttaaccaatgaccttatggctgagagttgaattgtggttcagtattcattgatctcactgctttaaaacatgctctttttgttcaagcaggaaaaatattatatctaattatgtctatgtggtaatacctaaaaagaggtagagagactctatgttcacaaaatatagtaatttcatttttacctttcttcagtggactgaattgtatggaaggaaattgatcagatctgtaattcacaactgtggaaacctacacaaatggggctgatgccattgtttcctctattttattttatttatttttgaatccactatctctttccattcaaaatatttccattcaaaatgtggttcacagacccgccacatcagcaccatccgagagcttattagtaatgtgtagattctcatgtcccagccagacttacagaattggggtctgtatcttaacaagaaccccagatgatttgtgtacaaatgaaagttcgaaagctgtgctctggacagtgttctcaaagcaactttctgaagccgtgtggaaaactgactctgtgtgggtcccgtatccctgtggcatccagacctggcctctcttcatttcattattattggccaatatttctttcagccatttcatttcttatctattaaaatggcttgcccataaaggaactgcataggattatcccctgacattccaagagcaaaataaagctcttgagagtaattgttgtctcagtcatgcttgctgattacagttagcacaaaagaaaaattcagctgcctgacaatacaggaaatgttctcagatgctgatgtttgtaaggtccggtggggccatgaggaagaagaggagctgaaggtaagaaactcataaacaagatgactctttgatgcatgaacaagatttgaaaatctcaagcctgtaaagaatacccctgctatttaaataaagctcataccaagaggtaacattttgccccgggccaaattcaggggtctagtgccctgcattcctttgaggcaaaaaataaatgggctatgactggttaaatgtccaaaaggtgaattctcatttcattcaaacaaagacagatttgcgcattcactcaagcagaatgtggccatgaatattcagcccctgcatacatacaaagatgtacgcatgattccccccaccaagcacacacacagtcacacacgcacacacacacacatgcacacacgcgcgtgcacacacgcacacatgcacacacacatacgcacacgtaaacacatgcacacatgcacacacgcgcacacatgcacacacgcacacacttgcacaggccctggctcttcaagcataatcatggtagtcatcagtgaaagacatttgaggttaagacagcaagtccttgacaaatatgttcatgtctatttggttctagttctataaaaatatgaacattgggactcagagaaaatggggaaaataaagtggattcaggttatcagtgaaatgatggtatagattacagcaaatctggatatatattgatgttactgcatttgcaaatgtcctcccattaaacagaaaatgtggctaaaatccctggcctggaactgaactagtttaaggcaggtgtaagaatagtgggaggaaagtttgtgaaagtttaaagaatgccctcaatccatgaacgagagggaggatgttgtctttaattatttagaaggtttttttttccttgtctgttgataattttatggaaggttgctttagatctccattccttaaaaaaatattacatgtcagtgtagttagatattatctcttttagttattatacttgctatttttactgtatagtgtggtataatcaacaaaaaataatgccacgggcatgtttacaccttttctgttgcactattaaattcttttcacagtattcatatcaatgctaatttgaatgtgatgccaattaaaaatcttgttcatttatattgtatatggtacaaggacgtagcataagatccaaaaaaaattttgtattgtcatttagcatatcaatttcagccaaatttggaagacttgatcatcttatcttttgctctacacactcaaaacaaatattgcagcagaaatatcaccttaaaaatatcttattttatatttagataatattgaaatcacagtctattaaaattggaaatttaattcaaataaaaatcaaacaaaatagttgtttcaatttatctaaatatctggtcttaagagtgccttaagagtgtctcgtttttaagagtgtcttaaaaaccaatatatgtataagtcaacaaatcatataatattcaataaatagctctgaagttgtatctgatttgaaacttaccattttcctggaaccttaactattattactttgtacgtaatactttcatgttactatgctaacaaaggatttaggtagccaacttaatttattatatctggtcggtcttctgcttgaaacagattcacactcaacacccaactaaggaggagccaaagtagtggagtattcctgacccaaaaaggcttttgaattttgaaacatttctaatgtgttaggttttctcaatgagaccattaaaaaacgttgtgttccatttgagaaaccagagtcaacagcagtaaatcagtgtgccccacaagccacgtcttattcagcaataaaatagtgctcacatggtgcctggcagacagtggctctggacagcaaagcactgagtcacccaaccccactcctttgggatggggttgggagtcatgcattggctccctttttcatcctggggaaattacaacacaacgcagagtgtccagaaatctaaagagctggtttaaggtgaaaaaaatgccatgaatgaatgaaccagatgtttaataaatcaaaacaactattttgttggatttttatttgaattaaatttcccaatttttaatagactgtgatttcaatattatcgaaatgtaaacaaagatatatttttaaggtggcatttctactccagcatgaaaaaaatagtggcatttgcactctagcattattctgtctcccttatttgagtcttcaatatatatgcccagctggagggagaagaagagaaaaatgaaagcactaggcctttgactaggtttggttctatatgctgtcatgatgttcaaaatgtcagacatttgaccacatggcacagtgaatactctcacgctctcaattttggctttcattcttgctagacttttcttctattaaatttctgaaataactagttttttttttttgaacttgaaaatcagctttttattttttttaattttattattattatactttaagttttagggtacatgtgcacaacgtgcaggtttgttacatatgtatacatgtgccatgttggtgtgctgcacccattaactcgtcatttagcattaggtatatctcctaatgctatccctcccccctccccccaccccacaacagtccccggtgtgtgatgttccccttcctgtgtccatgtgttctcattgttcaatttccacctatgagtgagaacatgcggtgtttggttttctgtccttgagatagtttgctgagaatgatggtttccagtttcatccaataactagttttatcatagctttccatgatgtaattttttaagcgaaaggtactaacatttccagtcttgatttccaagttttgtggtgtgcactcgaaatctagtctctgattgttaaactctgggtaggtacaagaggctcttaattttcttcctcccaggaggacttacttacacttaaaggtcaaaagcttaacattcacttctaaatggttaactgcatacactttaccctttgtaaacttcaatttatctttttttttttttttttttttttttttttttgatactgggtctcgctctgtcgcccaggctgctagagtgcagtggcgcgatttcggctcactgcaagtccgcttccaggttcacgccattctctccctcagcctcccgagtagctgggactacaggcgctcgccaccatgcccggctaattttgtttttgtgtttttagtagagacggggtttcaccgtgttaaccaggatggtctcgatctcatgacctcgtgatctgcccgcctacaagccaggtgtggtggtgcgtgcctgtaatcccagctactcaggagactgaggcaggagattcgcttgaacccgggaggtggacgttgcagtgagctaagatcgcgccactgcactccagcctgggcaacaaaagtaaaactccgtctcaaaaaaaaaaaaaaaaagaaaaagaaaaagaaaagaaaagaaaataaacgtggcaaaactagaccttcagacacttcacttcacttaaccctatggccctccttatcttgcacccaatttcttttcaacatcatacatgcttggttgactgtttcttcatatttgctgttcattctataaagtcaaatagattggtgggttaaaaaataatcaattcaaattcaaattaggaatttatggacattcagatatccacatatttgagggcaggaatttttacttttcaattggtatgttggcagtgtgtaaaaatagaagaccaagagaaggcggttgattggagttgatacttaatagctaataaaaattacaagaaaggatggtggaagtcaaaggacagaactgatacacgagtataaaagccaacgatgtcatatatgtaggcaaagtctttgtaatctgaatataatgccagagagctagggctgccaggcactctgtatgtgcagaatatgtcctatatggagtaattttttatttgtgtagacttttttaggataccttaaatgtcttacatgcaacctttttttccccatatattacaaaattgccttggaaattagacaaatcttcaaacttaactgaaactcctgtcctgaatagttatttgccaaatctgacaaatttacaaagagtgttcacataatcccaaactatgcccatttctacaagagaaatacatgcctctttatttggagtttatgatattcatacaactagtagtagagtcagggagtattccagaaacatatttccctggcttgcccaattatcaagggaaaatttcagctgaacacggggaacccagtctttgacactcctgtgtgcagtgtggagcagcgtgcactgtctgagtctccatagtgaggaatggtcttccctggggcatcaccctagaaggatgggctcaaagtcgccctccacgtgggtgcacaggagcccagattctcaagccccagttgcagaattaggctgatggttttacaaaagagtcctcctaaaagtccatcactaagttttgtttggttagcaacccttgccacatgatgtagtacttagctataattttatttttattcaaggccaaatcttatctggtgtccatgccttcccacctacttaaaatttcaaatttcaccctcaaaaatatttcagtaaataaaagttagatctactcaaaattagactccaagggaattactatagttgattatagagtatctatttccttaaaaaaaaaaaaccataagttgttgactctgagctaggaaatgcgtgatctctcagctgacttactttatgcaaatttacttaatattatagaagagtaaagagcttccaagaaggtgattggagggaagttcaaagggaagatttttttcattcactgtagttttagctgtattctttcatctgcaatcaaatctcaggattaaggatgtcgtattacatcaaatcattacaggaagtatgactgtatcagcggctttttacaaaaacaaacctccagatcacaaaaggaagctgtgtttgtgtactgacacgaagtgttacgtagcagccaggagaggaaggatagcagccgacttggatccatttttgaggaattatttctgtaaggtgtcatggaattgtaagttacaaaaataaggcttttgtaaacagaatctccattccagaaggacggactccaaaatgctacttaatgaaattcatgggaatgttatggtgatggaaatcccaaatgacatgtagattttatatgcaaacaatcccactgcttgtaactcctggcagtgtgtacttaccaaaatcttgatcacacttaggtctcttgctatatatagaaccacatctgatccttatacagtgttgcaagatatatgtccttgctttcccatggttcttaagtgagtcttaagcttggatttgctccagcagaatggtggtttgtgtttctcaaggctgagctactatttggtgcatgtcggaaatctcacactaactgtggatactctgtcatcactgaacccaatcatacaatgaccagacagctttaaatacctacttttgtatgctatgaattcatccgtttacttgtcaaatcctttatttccatatgtgtctccatcaccttttttttctctccggataaatggaattactgtaacttgtgaaacaatggcaaacactataaagctaattttacagtcttgagtttctttttgtttcactggaatggtaatggtgttacagtggtgctctgacagacaaaaaatctaatatgtccttagaaagttcagaggggaacttatttgaaataaccttttccagtgatggcaatcacaataatgtgggaatgactaggtcctaaaaacttatcaaggtgttactgtatatcagtacgtaaagaaatgtattttgcttctttccaatcactgaatagaaaatgaaatccctgcctcatcgctcctttttttttttttttttaagacagagtctcactccatccctcaggctggagagcagtggctcactgcaatctccacctccaggattcaaatgattctcctgcctcagcctcccaagtagctgggattacaggtgtgtgccaccacgcccagctaatttttttatttttagtacagatagggtttcaccatgttggccaagtgggtctcaaactcctgacctcaagtgatctgcccgccttagcctcctgagtagctgtgattacaggcatgagccacggcgcccagcctcatctctctttttctgcctgatgctctcctgctccagaatgcttatttcattttagtcaatgattaaaaatcaagcaaccgtttaataacaaacatcctttcagcactgcaacccttaccaaagtgccttttgtgctattgctcctttacttggatggattaaaagaaagaaaacacttaactacataagtcctacaggcattagtatgggtgtcaccctaaagccgcacacctaattaaaacccacgtagccaaggagtgcatccaaatggcagtagttatcctccaagcagtttcctgggaaaactacacacacatgcaacaagatagttgccacagctctgaacattccagagtgtctctcttagagccctctcctttggagccttggctcattctttgtaacattctcaggggtggccaagctttgttcttggagggagcatgtgacagctggaaataaacaaggctgatgcagatagtaggaagtcatctttgaggatactgtttgaacaaaaaggcaaaatgttttctagaaagtgcacagtcatctgaaacacagtcatgaagctagccggtgggacacattttattaattttaatttgcatggaagttttcagacacatgttattttctaccccgttatctcaaacgtcaattgtccttccaggatgaccttggctgagaactgagctaaccacatccaagccataaggcagcattgctttcaccacaccatgtccttggagcagagaataagggaatttgtcatagcaacatgggaagctttggttctgggctggatacgcaacatcccggcaggcataatttcccttctcagaaatcctgtcttcataaatgttagacaaacaacttttatggtttaatttttcatgcaaaagtccatattcttcccagaaactcttacattgttcaagtgattatgttctaaattagtctattcctttactggaatttaacacttgcataataatcttagctgataaggtatttgagtgatctaaatgtgttttcacccgtcctaagggctgctttctgcatctttcttagtttgcctctattgagtctgccagaaactcttactctttttaagattttgttcacgtttttattttatttttttattttttgagacgaagtatccctcttgttgcccaggctggagtgcagtggcgcaatcccagctcaccgcaacctccgcctcttgggttcaagcaattctccagccacagcctcctaagtagctggtatcagaggctcccaccaccacacccagttaatttttgtatttttagtagagacggggtttcgccatgttggtgaggctggtctcgaacacctgacctcaggtgatatgcccacctcagcctcccaaagtgctgggattacaggtgtgagccaccatgcccagcccacacatatttttaattaacaaataataactatatatagttagggattacaatgtgatattttaatacacattttagaataattatatcaagctaatgatatatccatctcctcacgtattttcttttttgtagtgagagcatttaaaacccactctattagcagttgtactttctcttgacagtgtacctctctgtaaactctgtttaacgtgcccactcagcatgtgatttaaagatctgcaatgaataagtccactatgaccaacagactcacagcctcacagcagcccagaacagtgtgcttctccttacccctacccccacagtaagtctggctgacctgctacatgttcaaatatgttgtggcatgttctattgcccgcgtgcctcttctgctcatacaagccccacaccccccaaacacacaagtctcatgacatctggtcacatcttagatatccagagagcaagaaatattcatatttgtagggctctgaatgctaaaaacaacttcaaatattcaatagtccatgttataccccatgaaagggtagaggaaggacatatgcagttatctacactttgcagaagaccctgtagcccactgacatcacttccagagtggcccagtgagccattggtggcaatctgggtcttttccttcttttcttttctttttttttttgttgagacaggatctcactctgtcacctgggctggagtgcagtggcgtgatcacgggtcactgtaacaacttcccaggctcaagcaatcctcccgcttcatcctcctgagtaactgggactgcaggtgtgcgccacgatacccggataattttttaatttttttgtagagatgaggtctcagcttattgctcaggctgatggcgaactcctgagctcaagcgatcttcacaccttggcctcccaaagtgttgggattacaggtgtgagccactatgctcagtctggattttttccttctggcctagtgttttatctccaaaatttacaacatggaaatctcatggtggagcagatttccatgtgagatggatcaaaattagggcaaaagtgatagcagaatagataacccaggtgaaagcatgagactgggagtctggataaattgcctaaaggcctaacatgcttcaaaaggtctgttatttagaggctggcaacatgagataaatatcccgaaggtagagaagatatgaagtgatcaattgaaaaggaaaaggcagaggagtaagaatgccattcatcaagacagaaacagaatccacatccctgctgttcatctaagcagagacaaacggttgaccaaagactagacatggggtgactaagattaagaaatcctacagaaaagtcaagatgaacaagcattcagttctcaagtcctcacattcattatgattgcatcatatgaggctcagaaaagttgagtaatttgtccagttacccatctaccaaggcgtaaagccaggagtggccaacataaaagcctggcttcctctccatgttttgtcctgcctcccaggtgggccattacagggtgcatccaaaaaagcataggtgatttggtggttgatgctcttggagccaaagcagcatttgctttgtgctcaagtgtttccatcaagtgaaaacaaagccatggttgaattgcggtgtcaccacagacgacttgcgggcgttgaattcatgcaatgcaaataataagggattgtgccagtgtgcctcccattgtgaatagagcagtgagctttcaactgaatgttttgctgagttctaaaaacctgatttgtaaggatttatactgggcttctcagagaggctttagggtaggtaattattttaaggtcttggctgattgagtcaagcggcaaagagagctttgtagagacaagcaaacactgcagaatcagtgcagctggctggaatccgatactgagcttacagggcctaaagggagcaggtgagtggtcccagcacaagcagtcactgcaattacagtgaccaggcccggggaaggaaggctcaagacccagacaccaagaaaagctagaaacacagggcaagagaacaaggggtcttagaagctgactctagaaagatgttctgacagattgctcttggcactagggaagacctgcctacaaatctctccatttcacaagcagataaataaagaggggcaaataggagaggagtggagtatgaacccacaacacatgacggagatcaaggaagtagagcttcaggagcagagacccagacccagggccttcaaatcaagggcaggactctgtccttaataggagtcaggaagaagggaagcaagacaaaaatcctactgcagggacagaaaaatgaaggctggaactcaagtgcaaagaggctggccaacacaggaaaggaactgggtaaaatactggggcttcctcattggaaagaaggatttgtggcaagctggacctggacaaggtacacttgttaaggagtcaatggctcgtaacatcttcatctctcctcagtaggaatcagagccggaaaccacaatttctatttcagtgcttcccagggcaagaattggcagccagaaggcaagcacatcatcacagcctgaagtgcatatttcatcatcagatgaagcggtttctcgcatcatttattatttacccagtcactttaacaaccacctgatctctgagacaggtccgtggagtgttgtggtctccacattaatatttatttagcgatggacattgtactaggaaataaaagcagattcctaaaagagctatgttatttgtatttttcgagggctgccataataactgcaaacggtggtttagaacaattcattgtatcacatttctggaggtcaaaagtctgaaggaggaccatgctccctctgaggtattttcgctggtctctcccagcttctagtaggctcaggagctccttggtttgtaggagcataattctataattctaatctctgtcttcatgtgcacatggtgttctcacatcagcttccctttgtgcctgtctctgtgtccaaattgccccctttttataaggactccagtcatgttggattagggaccaccctaatgacctcattttaatttgactacctttctaaagatcctatttccaaataaggtcacattctgaggtactagggggttagggtttcaacatatctttttgggaggatacaattcaacccataacactattctttcccatccatttcatcaccaattgatctaccttcaaccttccttctaatcagaatcatactcatataaataaaccagaataagattctttgctttggaagagacagaagctttctctgggttactgtaactgtcctgaatttcctatttctgcagaatggacagaaaaagctgacttctagcagacattctattatagtttgaccatagccacatgggaagttatgccagtggacattcctttggagacagtttctggttcttagtgcagagagcaaagaacattcttccttggaaattgcctccactattttgtaaacaggagaggacttttcaaacctggttttcaaacagccagagactaattgtgccctctccaagttaatcatatactgggcttcctctctcaactgctctcacaaagcttgctgatttctcaatagcactgagatacttgaaaataattgatttctagatgcctttcataattctggctctgccattgtcgtcattttgtgtctcctactataaaggttagggaaaacccttgcttggcaagccagcaactcaggtatgttgcctcaaggtgattctgcatccatcactggaccaccagctgaggtccccacacttgctttgctttgctgagtcaagtcgcaccccattgttttgagaataatgctcttatgtgttgcatttctccccaaacctctcctcatccagtgccggaaacgtgagagctacccttgctttctcccactccctcatcacctgtatctaattcatcacaaatccccgtccacgctacccctggcattgctctcaagtcagtttcttctcttccattctaatctcccggtgcttagttctggccaccatcatcatcatcatcacaatatatgtttttaaaaaggcacatttcacactggctaccctgtttctagtctttctccttcccaatctattctccacactgtacccagtgtggtcattctaaaatagaagtccgatcatattactctttcactcaaaacccaacctccagataaagggcaagtgtccagacattggactcatgcctctccttgatcttgctcctggtaacctcctcccttgtcatctctttcccttgcgctctactttcaaacatcctgaactctttgcaatcccccagtgctgaaggtttttcctcctcctgcagcctctgggatattggttatgcttctcctttctgggatgctaccaccccaaccctggccaactcctgcttggtctgctggctgtctgtctgaatggctttcttgacagtgcctatgtgattctagaggaagggatcctgccactctgttgacttccccatggtgcacaggacctgatatgggatggggggcagggaagtgccgggcaaagaagagcagagtccctggtgagggctataccctctggcctgtgcccacggacctaaatgaggataggcatttctggttttgagttcaaaaagttgccttttggcctgccacaccccttcccccatcctatgcctataaaaatctaggactgtagcaggcacagacacaagtggctagacgttgagaggagcagaagaacacactggcaaacaccagcagacactggcaggccagtgacagtagaatgacatagacacgaagagaattcagtcaggggtggtcagagaagagtccagccgctggatggccagactccaggggaagatcgctttcccactccatcccccttctgactccccatccatctcgctgagagctacctccaccactcaataaaagcttgcactcatctaagcccacgtgtgatctgattcttccagtacagtagggcaagaacccgggatacagaaagccctctgtccttgtaatggggagttgtaaacactcacccctaggtactgccatggggttggaacccaaacatgctccccgcaacctctgcacctgctcatctgcatgctcccactatggggctgaacagtggggttccaaagaagcgagcaacacccctgttacatgccctgcaagggggataagggaacttctccggtttcacatccacctctcagaaggctgtcctgacatcatgacctagcctgccatgcctctgggtagcattccatctctggagccaggccttccaactgggctgctcccaggcccttgcccactctggtaagtggctccccactggttcttctgataagaccggggtgtggtgagtgagatagggagacacttgcctcagggacaatatttgtgggttgctgaaaaactcagtaatcaagattctattttaatggatcagtaagagtgcttaaaggaatatttatagtttcgggtgtttgagaagaaaaaaaaggtttcttctccagccttaaagagtcagaaaaagaagaataaattgaacccaaaatagaaggaagaaatcaaggaaataggaaatacactaacaagagttctgtttccagcaaaaaaaaattatcctcccacagataacaactataagtgctggaaaaatacataaaaccaactaaccaaggaccctagagagtgaaccaaagcaagcacacttcacaggagagttgaagttcacaggaagcagccagcatgggggaaattctcatttttttcagctttaccctaaggatagatgcagctggcttgtgtcagaggtcaactaaagctcctgtaaatagctcaccatttttctggctcatgaaaaaaaagagaaggtcccaagggcaatcagggctactggagggtggaagaaatccaagaaagaagagcacatgaaatgggaatccctaactttgtgcataaactctggacaagtcagtgggtgaccaccgaaccgtgcatagagagggcagactgcaccagtccaaactaagatcataaatactatgtaaccactggcaagaccaagcttgaagtttaactctaacaaagtttaactctaactagccctctaagtgaacatccacatactttgtaaaaagagaatggaattcagaatctctacaacatatctttgacaatgttcaggatacaattcaaaattaaaagacctatgaagaaccaggaaaatgtggcttactctcaagagaaaaggtagtcaagagagcctaaccctggggtgatcctgatgttggaattattacataaaggttgtaaaatagctgttaaaactatgctcagtgatttaaagaaaatatgcaataaatgaaaacttaagaaatctcactaaatacatagaaacatgaaaagaaccaaattaaaattttagaactggaaaataaaatacttgaaataaaacttttactggatgaactgaacagcataatggaggtgaaagaggaaaggataggtaagttttaatataaatcaatagaattatccaaactaaagacaagaaagaaaaaaagactaaaaaaagtttgtcaaacaccaggaatctgcggtataatgttaaatgtactggcaaaaaaatcccagaaagagaatggggcagaaaaaaatatttgcaaaataatgacagaaaataaccctcatttggtgaaagagaaagatgcacagattccagaaactcagaggaccccaaacaggagatgttgtattatatcaatatatatagattatatatgcagaagaccattttaaaaataatcaaatcaaactgctacaaaccaacaataaagagaaacctttgaagagagcaagaaaaaaattctacattacatgcaggagaacaatgattctaatgatcacagaatctgaaaagagaccatggggtgtagaagatagtagaacaatattttaaaatgttaaggggaaaaaaaaacttgtcaatttagattctatttccagatatatatgtttgtttccagatatatatatatatgaaatatatatatatttctatatatatttcatatattcttctgaaatatatatatatatatttcaagaatgaagacaaaatgaagacattttccaaataacagaaaactaagaaaaattgtctctacagacccacagcacaaaaaatattaaaggaagattttcaggctgaagggaaataaaatgtcagatggtaactttcatcttcaagcaggaagaaaaagcgtcagaaatggtaaatatctagggaaaaacctgttttctcttaatttatttaaaacacatatggatatatttataattctaaaagtatcttgtggattatacatctatatgtatgtggattatacatatatgtatgtatacacacataatagcataaagacagtggggtagtgaatggatatacacacttgtaagattcttacattcatataaaatgatacagtttaactcgaactagactgaaaagttaagaatgagcatgggatcttcagagaaaaccactagaactgataaattagtttaataaagtcacatggtaaaagattattataatcaattgtatttttaaataccagcagcacaaatttggaaaataaaagctaaaaatttatttatgatagcttcaaaaataaaatatttaggaatatatttgacaagatatatctacaacttacaactgaaaaatacacaacattacagagagaaactaaagagcacctaaatacatggagagataaaccatgctcataggttggaagactcaatgtggttaaaatgtcaatttccccaaattgattaatagatttattacaatcccaaccaaaatttcaaccagctgttttggagaaattatcaaacagattctaaaatggatgtcacaatacaaaagactcagaatagcctaagattttttttaaaagaatcattttagaggatttgtactaattatgtcaacatttattgtgaaggtgtagtaatcaagatggtatgtaattacaaaagggtagacatttatcaatggatcagaatagagtccagaagtagacctacacatataatgccaattgaattttggtgaacatgcctgaaaaaaattcaatggggaaaggagagcctttccagcaatggtgctagaataaccaaatcttcatacggaagaaaaaaacactacagagaacctcacatcacacacaaattttaaaagggattgtagacctaaatgtataagctagaaatacaaaacttcaattatgttttgttattaggtataagctagaagtacaaaacttcttgggaaaacatacaaacacatttttgtgactttggggtaggcaaacatttcttaaacaggacgtaactagtataaacaaggagaaagatgatcattggattttatcaaaattttttaaaatttcctaagggaaacaattaagctaataaacacaaaccacaacattcggcaaaactatatatatatatgacaaagcacttgtatccagaatatataaagaagtcctgcaactgaataagaagacaaaaaagtcaattaaattgtaggctgaagacttttttttttttttttctgagacggagtcttgctctgtcgcccaggctggagtgcagtggcgccatctcggctcactgcaagctccgcctcccgggttcacgccattctcctgcctcagcctcccgagtagctgggactacagacgcccgccaccatgcccggcttattttttgtatttttagtagagacagggtttcaccgtgttagccaagatggccttgatctccattggcagaagatttgaacagattcttcacaaaaagaagatatatgaatggccaataaacatatgaatacattattctacatgattcgttgtagaaatgcaaattaaaaccacaatgagatgtcacgataaatccatgaacagaaaataaaaagactagcccaattgttaatgggtacatggagcaaacggaactctcgtatactgctaaacagaatacaaaatagcacaaccactaaggaagactgacaatttcttaaaaagttaaacacacatattgtaagactcagacattccattcttaagcactacccaagtgaaaagagaacatctgtccactcaaggacttggttgggcagtcatcccttggcatctgaaggggattggttccaggatctccttcagataccaaaatccaaggatactcaaattccttatatcaaattgtataacatttgcatataacctacatctattctcttatataccatctctagattatttataatcataatacaatgtaaatgctatgtaaatagttgtttactatatttgattttgaaacctattatttttattgttgtattctagtttgtattgttttgctatttatatttttgatccatggttggttgaacccacagacacagagggccaactgtacaatattgttcatggaagccttcttcataatagccaaaatatctgtaaaccacctaaatatttatctattggtggccgggcacggtggctcatgcctgtaatcccagaactttgggaggccaaggtgggcagatcatgaggtaaggagttcaagaacagcctgaccaacacggtgaaaccccatctctactaaaaatacaaaaaaaacagccgggcatagtggcgagcatctgtaatcccagctactggggaggctgaggcaggaaaaatgcttgaatccgggaagcagaggttgcggtgagccgagatcgcgccactgcactccaacctgggggacacagcaagactctgtctcaaaaaaaaaaaaaaaaaaaaaaatatatatatatatatatatatatacacacacacatacatctatcaatcggtaaatggataaaaaaatatggtctgcccatacaatggaatacaagaaaaatcaatgatctactgatgagaaaaacaatatgatgaacatcaaagccattctgctgagcaaaatgagccagaagtacatactgtatgatttcatgcacagaaagttaatcagaagttgcttggggtcaggagtggagggagaaatggactgaaaggaccttgagcaaactctgggagcaatgaaaatgttctgaatcttagttgcaacgacgattcacaggtttatacatcactcaaagcacatcaaccaggacagtttaaatagatctttatcttacttttaccacaataaattggattttaaaattaatgtgcatgctaatcactagggagctagttgaaatggaattctgatccattagatttgggagtttcctaagtttccacatgtattacaagctgccaagtgatacccatgctgatggtctgagttccacacttaagagaagcttcagactacgattattcaatccccaaatgatgaagccgaggagcattttatgaattctcttctcgggtgtgattaacattacctctctcatgcttttagagctgtgtcatgtcccggaacttcccctgacgcgacattaatactctgtgaggttgctaataacaatcacatctggcatttacaaagcacacactaagtgttgggtaccgttcttacagctgtacatgaatttacacatttaatccttgatacaaaagcaggtactattactatctcatattgacaaatgtcaaaacaaaagcccagaaagtttatgggacttgcccaaggtcacccagctgatgagcagatgaggtggattcaaacctaagcatcccaaactcttaagcactgtgctctgtggcttctccttggaggaattataatcctctgagtgaggaaatcttcctgctttgccacactttatggagggctttactggttcaacatcaaacattgttgattgagcacttgccatgtgtcagggatttacccaggagttggtggtctgctctgtgcatacttccctgaaaacacatataatcctttgcctactaacccagcattggcagtgcccactctgtgggttgtttgccaagaatgctgactgtcattactttgccacctccctccattctcccactgggggagtcacaggtgagcagaagcagcctcatacgtttccctagtgtcagagccagagctatgagacaaccaggctatgagcatctagggttttgttgtgcttttgtgatctctgactatcagaaatatggagcgttgttcagatatccctgcaactcgaggaaattcatttaaactaaagcatgacagctgtcagtgagatgaaaggtagagctgaatctggagctccttcgtgcaggcctgtcgtattattccattctcatgctgctataaagaattacctgagactgggtaatttataaagaaaagaagtttaattggctcacagttctgcaggctggacaggtagcatggctgggaggcctcaggaaaatttcaatcatggcagaaggtgaaggggaagtaggcacgtcctacatggctggagcaggaggaagagatcgaaaagagaagggctacactcttttaaacaaccaggtctagtgagaactcactcgctatcatgagaacagcaagggggaaacctgcccctgtgatccagtcactcccaccaggcctctcctccaacactggggattacaattccacacgagatttgggcaaggacaggaatccaaaccatatcacctgtcaacatttccatctccttgaccaagtgggagtgagagactcctgacccctctcctggaataaggataacataacccagggcttcagagttgtgagctccatgtgctagcttgttgcagcaagtcttgcagaagttgagtgatggggacagagacccagcaaaggctctcctaggagagctgcatgatgcattaacagtgtccactacagtacaggagcctttcaggagagatataaggaggagtttcctgagcaggaaagttgttgatcacaagaacaggtgagcaatgaagacaaaactaaactggagtcacaacaactcggatataaatccaccctgaggcaggggactggacccattgagctgccagagcccttatatatctataagttgacttcagagagtttcaaatccgataggactttgcaagtaccatatcgaagataaagaagctgatccaagggaacgttggccaagcccacttcgcagttgagaacaacatggcttaaaaacagcctgcacagcttcctggacgtcccatcacatttgccaaatagcattttggtgagctgagaatcaatgaatgagaaacagatggatttaatgtcccttgaaattagggatgggtgagcccagccacactgtggaattgctgaatgtctcaaactatttttttcaagtatctttggttcagaaaaaccaaaaccatggttttgcaaagcacgtttcctctcattcatatgagggttcgtgtattttaacggaaatttgatctgcatatttcaacttctttacacttcacttatcaaaatgctaaataaaatttccaggaagtctgagaaatatttataacttttttttccaaactattttatttaggaaaggaaacaatggggaagtttggaaaatcctacaaaagagaaggtgggttcaggtggaagttcacacttttagggagttctatgtcccagaattacgcacatgttaggtgtgcagtcacaatgtgctcaacgagtatatttgaaaatctcttgaaaagtgaggggaaaggtgggaaagttcaataaggacaagcttgaggaaaggctgaaaaatacaacataatttaaaatagcttctcatctctaatagccaggcagtgtattcctagcagccataaatctaatgacgcagaactatagcattcttgtatcatccaccagcatgaactccaccattcttcagatgtcttttctctttataagacttgtgataaaggtgcttataggatgctcatgagtggagggatggcaagaggagagggtggaagaaatgcaccacagagggtgggtgggagcaggcggtggagtgagtgcccagcgccatctttgttttagagaatgactctgaccacagacttatgtgtgagccctgaagagctgtttctacttaaagcttagctttcggttccagaggaccaagtaagacacaagcgggagagacgcagtcatcccatctctcagggagctcagtctgtttgtattgtgctggaagcacagtgcttgctcatcaccgacaggcagacttctgctcatagtgtcattggcagagagtgcagcaatggacactgcccaaaaggagagaagaaggaaaaggcaactccttgtggtatctgattacgtttgtctcaaatgcccaggagacattccctggggattcccagaaaagcaatttaagatggggatttgacagggagcaataataattattgatacaatctgaagaataatgtttattacgatgaatatgcttctcatttaaatccccaggctggtgcaggaagcacaaacatggattacatatctctttaaagccatgtattttctggcttttaaattagaaaacccaagtagggttgtgtggcagtgacaataggagttgtcaaatattcctgggactcccccacatttcccagcagccttccaggtagttaggttggtggcagtgattgatctgggccaacagggtgtgggcatgaatgatgtgtggcattttctgaccaagatagtcaattcttccattcctccctcccctcctcagagatcttggtctacaatttgcccagatgttttagctaaactggacttctcacaaaggagaactgagcttttactctgtaaaaccactgtgatttggcgggggcgagggtggggggtcttgtttgttacagtggctagtgttaactagcctgattaacacaagcgttaactagactaatacaggttgtaaacttacaacctgtcattatgataccctgatagtaataaagctggtggtttggggtaagattctcagaagtttttgagaatatagtagtgccttatattagtaatctactgctatattaaaaactaccttaagaggtagtagtttaaaacaacaagcatttattatctcaaagtttttgacggtcaggaattttggagtggcttaggtaggtggctctgactcaaagtgtttcatgaagtgcagtcaaaatgctggcaggagctgcagttatccaaaggcttgattggggctggagaatgcattgctcatataggagccctcaatttattgctggtttctggctggagttctcatttcctcatcagatgctcctctttgtaacgattctcaggcaagggaagctagcatcattcagacagagtaatccaagagagaaagcaaacaggaaaccacagaatcttttattgcctagtatctcatgttgcttcctcccccacctattcattaacagtaagtcactcagtctagccacactcaagaagaggagaataggttacagcttttcaagagggtttcaaagaatttgtgaacagattttaaactaccccagagtgggtacaccccattaccccagagtgggtttgtaggtagctaagggggtagaatggtgggtggcacctaaggtggggggttcagtgacccaacataaatcaggctaatagagtgtaatggtgtgactgctcctatcttacattattccttaatcgcaacagcggatgaagggaacccagccaattctattcaagcagcctggactgggcccctgacaagcatctgcatatggagatgccaaggtaatttgagatggggattttctacagggagcacagagaaattcctggttgcttacctctgtgcatagacatgatgcagaggaaatgaactctcatgaaacaggacattgtgccgtaaccaggcttgccctggctgtatagggaggtgagttccggcattgtcctctgacatagccccctcctcccaacctcccagcttgcctggcgctacatagtgtgctaattgctgatagaaaccctgggagtttgcagaggaggataagatagatcctacagaaagagaaattcttccctttgcataaaacctgtgcaaatgaagctgatcttgatcttagcccatggcagggaatggcagtaacactggaaatattggctttgtgaaggctggaatttttcatctttcctcctatattcatagtgcctatataagtgtgcactaaataaaaagcaccttgctggtattttttaattaattgaatgagctagcatttaccatggaagaaggtgtggtggcataagagggtgacaggagttctaggtctcataggttcctgatgccagaaaattcaccagcccagccatactgatggcagccttgcaccctgaggaaatggttgtgtgagttcctatgaaacaataacattgggatctaatccaattatgatatgacccactcttggctgagcccaaagtgggatctgcaccatggggcagggaaaggaccagagataaaggctcagtttatgccactccttctcaggctgatggtgtttacttgcatagccataaaaagcagccactggggacagtgggagagtgtggtaaagctggacatattgcattagcttgctaatcactattagcagcagtgagaatgggacatttccttagactccccggatttggacagcaacagcaggttctggggccacagtggtggtacaacagagctcccctgagccgccagtgtccagaatgtgaagtcctctagcctagggggaacatagcttctcctactaggaactgataaggaggagccacagctcagcaatgggaagggtagacttctttctcatcttggcatgggcttccctggttgaaacaccagctggtgaagcatgacatactggtttgagttagttttattttatctttaagaggacttttaactggaccatcacccccaggaaatgtttcatgtaaagaatagccaagaaggccatagattccatcccaccaatgacacacagcaactgaccattcacccccatatcctgcactggattttccatatggccaactcaagtacacatattgctttaccaagtgatgctcatctttgcctgcaattaccaccgtgattacatttctcctcattagcctagatgggagggtgcagggaaggatggttggatcaggagatctagttaccatactccgacgctgaatttgctgggtggctctgctcaagtcagttgacccatctgtgcctcctctcgtggcccttgttcagatatgcagtgattccatgactgattttcagtgttggtctcaagcatgtagctgccacttggtgcagagcattagcatatctttgtaattgctaatgagggaaacaaaattccagaaaagctgtttggaggaacctaagaataacactatgagctaagcattctgcccaaacaaattttgttaaaagaaaaccaaattattatccttttgcaaaataatagcaataatggccttaactaacatttgccaggctctaaatatgtatcttgcggtgtctaaatattttacacattgttttcattccctcctgttcaccccattggtgagggagacattccacactagaattatgaggatgaccaaacacattacactcgatgcttaacagatgcgattgacggcagttattattcacatacactcgcagcttgggagaggtgaacacagcatgggatgctggccatacaggggttgccctcaggagcagggtgaacaggcaggggctgtgggtggcaagctttgtagcaacaagagggtgaggtgctccctggttcctgcaggagaatgtgatgggctttgaacaattccgaggttagcaggaaactgatacccactactcagggataagtaggagctgtgcctggtccacttgataaggtgggttgcttgactggagccttatctgcaagagtagaatggagagaggctcttgtgggtaggtcagtagaggtactgctgatttgaccagatttgaaggcagcacactataccacgcctcaatttcagcctttacatgacacacacatcgtattatttcatcatcgcaacactcctatgaaatatcattaagcctttttacagatcatgaaattgaggcttaaatgaggccaagcaaattgcccagtgtttgctagctggcaagtggctgagctggtattcaaagccaggtttgttactctcagagtctgacctcataagcaactgtggacaggtagatgtaacaacccatcttagacatgaatcaagaaaaaagaaggacaaggggggaacaccctaccccaaataaccagagagctcaacttaaacacacacagtcttttgttctgtccaccatgtgacctcctgagtcccaccgctaccttccgcaaggcagctgggttaataaagccacctcagtgaccattaacagcagcagctctgcctcacactttaatcagtggtccctgaagtgcttacaagcccagctgctcgggacacacttttgattctacagcctggaggaagagaaaccatccaagcagatcaaccatttcccaggtgcttcaaattcccaaggtcagagacggcaccagtcagtcatccttttgcatgtggatgttgggtatgtcaaagggacttgatgttctggaataaattcctttacacagaaaagaggctttagatctctttcagtccaaaaccttcattttatggttaaagaaagtaaagtggcctccccaaggtcacaaagttggttagggcagaacctgcttggatcccttccctaaaccctttcccaacttcctcctcccatgcacacctcccactctcaagtggaagaaaggagaaactctcttcctcagcaccctttgcagttaggctgaccatgtgacccgttccaggctttgtgccaagagggaatctgccaggaggagtctgggagcagtgtttcctccctgatagaaagaaagaatggccgggcgcggtggctcacgcctgtaatcccagcactttgggaggccaaggcgggcggatcaccaggtcagaagattgagaccatcctggctaacatggtgaaaccccatctctactaaaaatataaaaaaattcgctgggtgtggtggcaggcacctgttgtcccagctactcgggaggctgaggcaggagaatggtgtgaacccaggaggcagagcttgcagtgagcagagatcacgccactacactccagcctgggcgagagagcgagactccgtctcaaaaaaaaaataaaataagataaaaataaaataaataaataaataaataaaatttaaaaaaaagaaagaaagaaagaaagaaagcatggcgaaagagctctctcaccatcctctccaacctctacctcctataagagccagtgaaggacctgaggcttgaaaccagaggtgtcttttagccatgagggaaagttcagagatgcggacacagcaactcagcctcatgtggctgctaaatcaacccccaaactgcccttcctgactcctcatttcagtaacaattaatccaagtttaaaccactgttagtcatgttttctctttgcagccaaacaccctcctctgagcagcagtcactagagttaggcagtgggtgaatacccagaaatgtcactcactagcaaccagacccagggcaagaaacttttctctgtctcagtttccttttttggaaaatgggcatatatttttacagaggtgctgtaaagtagtgctccccaacctttttggaaccagggactggtttcgtggaagacaattttcccatggaccaggggtgtgggggtgggggaaggtttcaggatgactcaagtgcattacttttattgttcactttattcctattattacattgtaatatataatgaaataattatacaactcaccaaaatgtagaatcagtgggagccctgagcttgttttcctacaactagtcagtcacacctgggggtgatgggagacagtgacagatcctaaggcataagattctcataagcagcatgcaacctagaccccttccatgtgcagttctaaatagagtttgctatgagaatctaatgccgccactgatttgacagcaggtggagctcaggcagtaatgtgagcaagggggtgggggacgactgtaaatagagataaagcttccctcgctcacccatcattcacctcctcctgtgtggcccggttactaagagtccaggactggtacccatctgtggcccggcaggggggagtggttggggacccctgctgtaaagcttaaatatttataaagattgtataatattttctagctcacaattgactgttagctattattatttcattattctctcagcctactttcacagaggctctccaacacagagctcctcaaaacttttgacaatacagatgaattacctggcaattgtgtttaaattcaatttctgattcaaaaagtctgccgtgggcctaagactgcatttatgaaatcttttagggtatgtctgtgctgctggtgctcagatcacactttgagaagcaagactgtgggaccctctgggtctgtttcctgctagttcagccttctagctggtggatttgcactaatagtatgccccaaccttctcgttatactcatggaagctctttcctacagtcagactgtccttacatccagcagcatattcatgaaattctaattcctgggcttagccagtgactcagaccctccttctccaggtctaatggatgtcactgtcaatcacaatgtcaccctcaaaggcccacggtctagcctagtcagagggaactggatgtacagaaagacaggtatatggaagaaatctggggctttttgaggatttcattcaaagcaggatgcaaaggttcatatacttcaggactggagccacttgggggccttggtctcaggatgatgtatgttatgataacccccaggactagaatccattaattcccttgatccagcactgtgctccagccctgggacaggcttaaagtttgtcctgacccagttcatctcatctgcctgcctgtacttctgtcagctgcctgtgccagatgttttattcccctccttccacttgtgaagaagctcaaaacctgcgatgagctctacttccttccaaggccagtcttgccttcacatacctcttccccttcttctccctgtactctctccactgggtctccccacactcttgccccccagtcctgtgctttgctctccatgttgctgaagttcacgttctttccttccagattgtaccctcaattcctctcaatcgattttgtgttgcgtgactaccatacagtaggtaattcataaagaaaagatatttataaaatttattctcacagctctgaagtctaggaagtccaatgtcaaggtgctggcatctggtgagtgccttcatgctgtgtcatccccaggcagaggacaagagagcaaaagagaaggagatggccaaacttgcttttataacaaacccactctcatgataactaacctactcctgcaataatgacattattctattcatgatggtgaagccttcatggcttaatcacctcttaatggtcccacctcttaataccatcacaatggccattacatttcaacacaagttttggaagtgcagtgttttgattatttgtccccttcaaaaagtatgttgaaaagtctcaatgtagcagtattaataggtggggcctttaagaggtcagtgagtcatgcgggttctgccttcatgagattaatccatacatgaattaatggattaatgggctatcacaggaatgagtctgtttaaaagccagcgtggctctcattttcacacccttgccatgtgatgtcttgagccatactgggattctccagagagtccccaccagcaagaaggccttcgccagatgtggccactcaaccttggatttcctcagaactgtaagaaatgaatttattttctttataaattatccagtctcagttattcaattttagcaacagaaaacagagtaaggcaggagggggacattcaaaccacagcattccaaccacggcccccccaaaactaatgtttttctgacatacaaaatgcattcattctatcttgatgccccagaagtcttaactcatttcagcatcaactcaaaagtccaaagcccagagtcccatctgaattagaaatcggggagactcaaggcatgattcatgctgaggcaaattcctctccagctataaactgtgaaattaacaagctacatgcttccaaaatacaatggtgggacagacataagatagacattcccattccaaaagggaagaataagcaagaagaaagagataatctgctttgactccatgtcctgggcactctggggcaggagttgggttcccaggaactcaggcatccttgctcctatggctttgctgagttcagtctacctagcaggtctcacgggttggagtgtggcaccagcagctctcccaggttaatatttcaagctggtagctctacagttctggggtctcagaaatgaccctggctccgctaggcacagcacagcccctgcagcagctccaactccacatttagactcagcattgcccgaatagagctccctgtgatggctctgcctccatgacaagtctttgcctgggcccccaggtagactgtgacagcctttaaaatctaggtggaggtcactgtgccccacagctcttgcattctacatgcctgcagaattagcaccatgtagatgctgccaatgtctacagcttacaccttttggagcagtagattgagccacaactggggccacttgaaccacagctggagcagtggagaatcactgcaccaggatgtaaaaacagagacccaatgtggccctggacagtgagcctgtagagggcatccaggcccatccccaaaaaccattctgtcctctgagagctctggacctgtcattgagggcagctttgaagatctctgaaatgcctttggggtcattcttccactgtcttgatgagcccttccatctgtacgagtctccttacccaacggtttgttggccacacccttggtttcctcatgtgaacacattttcattctgtaaatggtcaggctgaaaatttaaaaaatttttctgttctgcttttgttttaaattataaattccatctttaagtcatttttcccctcttggatcttactatatgcagttaaaagtagctgcacaactcctccaatattttgcttagaagtttcttctactggatattctagtcgggcactcttaaattccaccttctgtaaatcccttgagcatggacacaatttgaccacgctctttgccatttcataacaaggatgctctttactccagtgtccaaaaagataccctctttttccacctgagacctcatcagaatggcctttacactcagcatttctaacaacattctgatcatggccactcaagtaatctgtaagaagtttcatactctccctacagctctcctcttcttctgagccctctccaaaattgtccttactactctgtttatggaaatgtaggctttttctagcctactcttccaaattttttcaacctctatcgattgcccagttccaaagctactttcacattttcaggtatttgttatagtaacagcctcaattctcagtaccaactttctaaccattttgtgtttctataaacacaggttgggtaatttataaagaaaagaaatatatgctcacagttctgaaggctgggaagtccaatatcaagatgctggcatctggtaagggcctttgtggtgtgtcacccccatggcagaaggtggaaggcaagacagcatgagagagcaagagagcaagagggggtcaaattcactagtacaagcagcctactctcataaaactaacccactccggcagtaacaacattattcaattcttgagggtggagccctcgtggcctcatcacctctaaatactgtcacactggcaattaaattttaacatgaattttggaggggacattcaaaccacagcactctccaaacctctcttagcatcttctataagcctctagtttacaatatgccaaatgccactatggccccttgtttgaaacatgtttgtctccccagtcactgagctttctgaaggcagcaacagcctttcatcccagatcctctttctggctggacccctcccctggctccaccccaacctaacatgccttccaggcacctgtgtcactctggaggcggaagagcacaggcaattacctgtgtgatgtgtttttccatctttgtttcattgccttcatcaaccttctgatcaaggtagccagaagctgctgtatgatcaagtgaaaaaataaaatctcagaattattaatcacttctaatgtgctgggcaccctgataagaaatttatgtatgccagtttaattaattcttgcaactattatcgctattggatttctatcatctccactttacagatgcggaaatggaagctgagggcaggtaataggaatattgcctgaggttccacagccaggaagagaagcagtggagccaggagcccagcctctgttaacttctagcaaaatggctcaaggaaatatcagcacaaacctggttcttggctggcttctccttttcaccggtggacaaactggtggaaaagtggagggtcctgtttaaaagagagtagtttagttaaatcactgagttttatttcctcccaccaaactatgagttgttatggtaagatccctgagtcaatgccaatcttctacagtcctgggagcttaaatacacttggcaagcaacaccaagttatacagtttccaatacttagaggtatctgtgaatgcagatcttaatgcagtatattcttctggggctgcattttctgtctgaaacagagaatgtatcttagatgatgtgcttagcatagaacatgcttcatctcaggactcagttaggataacaacaaggcaggcacattggccagtgtcaagtgtgaaggtccaatttaggcccttactgtgttgaaggccgctgggcagatgccaggacagacacagaggccaggctccagcacagcgtcaggggaagtccatgccagggtgtacttgatctgatctcccacataacataaatgatcctagagacgaaggtcctgccaagagatctccaggtgactccaggagtccttgaggctgtgaatctttgcaccatactttaaatttctacaaagccccaaatgcctgtcgcctcctcagctccttttgtaaaggaacatgggtaaaccatggaccattaagagtagacaaagttttgccaagtccttggtgctatgtagggaagagcttctcagaatgttctactgggtccctctagctgtggagtagggcaaatgagcaccgggggtctggagggataacccgaagcagccccataacttgcatggaatgtttttgaagtcttgtatttatcttaataattcatgagaattttacatttctttccatgctatacccatgtctattttatattaaatgtagcattaataattgcccgaaacctgaaaaaaatggtgccccagaaagctgtacccacagttctcctgtagctgccctgggggaacataggccccagttcaaaagcaccgatgtatggcattaatctcactgattattctagaaccttctctggcccacacttagaaaaaccacaggcagccaggggcttgaacctaagcaacatgcacacaagttcagacccaacaaagggaagaatttccaggagagatttgtgcataggctcaagaagccttttagaaaatgaacaaacaaaatatctcatcataagtcagggacacctaatattttggattctctgaacactgatgtagtctacagagatcctcctcagaaaaaaaaaaaaaaaaccacaaaacatttcttaggtctgtgtgtcctttagagatttctagcgacctgagaccatctgtgggtccctaagaatataaagattcccactgagatcctttgtgcaaaggtcccttgtagagggcatatgttttctttaaatgttttgagccaacgtctaaacattgagaaagttcacactgttgtctggatcctggagacttgacagctttggacctacatgatctcatggctccatggaggggaggagctgccgctgcccctgcagctgggattccctgtcccctctgccacaccacccccattcctccttcacagaacccgccggcccctgtggccgctgaactggtgacttgtcatgccattaggtcatcgtcggggacatcaggccctgacagtggccaagagccatctggagtccatgctagtcatcacgtgccccagctgaccttccacccagacctgctgcagggctgtggctggagaaaagctgggtcaaagaagcggaagaatctacagatacatccagtactaggagcattggttgcagtggaggagttcaattccccatatggggaatattctccccactccacttggaatggagccatgagggtgagtggagagtcagagtctgccgcagccttggggcagaaacagcttcccagacaacatcggcaccttcccttgggacggtggtggctgcagcaacaaattaacacaaatagggtgacttaaaacaacagaaatgtattgtctcacagttctagaggccagcaatctgaagtcaaagggtccacagggccatggcaccctctggagactcaagaggagaatctgccatttgccgcctccagcttctggtctctccaggcatccactggcttgcggctgtgtcactccaatctcttctttctgtctgtgttttctcttttgtctcttctgaagactcctgtcattggatttggggcccacctaatcaatccaggatgatctcatctgcagatccttcccttaattatatctgaaaagatgttttttttccagatgaagtcacattcacaggtactcgggattaggactcggacgtatcttttgggggtcaccattcaacccactacccagcttcttagccactggcatacgtcataggcaacagcagcccctaataacaagtatcagtcatggtggtggctttgccagtgttcatggtaaaaagtgccctccatgagccagacctgagtggggaggagaatacagaaccacatcgcaacttgacttggatgcccttggtaatgagcatgagagcccaaccggaggacaccaagaggtctctgggagagatggaggcacatgaaagaggtcctggaagagtcagtaggggctgagcctgatttttttttaacatgctgtgacctatttgcaccccaaggctgctgaggcctggggaagtgcttaatttgcacagctgcatcctcatgagagccctggtctcatctgagtccacctgcccatgccccaaatccaaaccagtgtgttccactctcatgctctgccaaccagtatgaggtgagccatccaacactcactgagcatttcccgtgtgaagttcccatgctggggtacccctctccctagagctctagatggagagacagagaggcattctccaatcacctgggaaaagtcagttaggtgtggatgccagaggttttcatcgtcctattcctgtcccttatttaaaaagtgagtgggctctgtgttcactgtcccctggtgggatgcagtagaaataaaggcagaaattgcccagctttggtcttctggaagtctaagcccctgggggatttcagagaatctactgagctggcaaaataaaagggcttaggggtatgtattagcccattattgctataaagaactacctgaaactgggtaattgattaagaaaagaggtttaattgattcagttctgcaggcttaacaggaagcatgactgggaggcctcaagaaacttacaatcatggcggaaggtgaaggggaagcacgttttaccatagtggagcaggagggagagagagacaaggggaaagtgccacacacttttaaatgatcagatctcatgagaactcactatcacgagaacaacaaaaggggaagtccaccccccatgagccaatcacctcccaccaggtccctctctcaacactggagattacaactcaacatgagatttggatggggacacagaaccaaatcagatcagagtagaaacaaaaaatactggaccaataaacagaaggaacatttccccagatcaggcaattttccccaggtcagggagatattctcctggggtgtggggaggagactgggatagctcagcaaggtcccaggaaggcggcagctgcctggtcctcttaggtacttgagaaaggtatcttcaccccaaatggggctttgaacctcaggcctaattgccccaagggccagtcaatggactgtaatgtatatagactgatgatgaggcccaatgaggaccagaggatccactcctgcccccaccccactcagcagttccacaacctacatatgtccctgagaccatgatctggtcacagagtaaggaaagtgccttggtttgctagggctgccccaacaattccacagactgggtggcttcaacaacagacttttttttttgtagcacttctagaggtcagaagtccaagatcaaggtgtcacttggctatttctgaggcctctctccttggcttgtggatgactgtcttctgcctgtgtcttcacatgggcttctctctgtgcctgtctgtgtcctaatatcctcattacaacactgatcatatggatttagggcccactctaatgatctcatagtaacttaattgcctctttagtggtcctgtctccaaataccatcacattcggaggtactggaagttagaacttcaacagaagaattttaggagtccgaattcagccctttacaaagaggaactttcaggaaatgatccagcttggtgaagaaatggttctcttgaaataaaatttaagtaaataaaaaacacagatttctcttttgtacacacctcgggatgtggactgattcatgcctactggcccccacaggtgccttttccccaggcaggaaggtacagatcctgggaggggcatgattgtgtttttgttttttattttttaaaggaaatctccaggtgattttcagtccctcccacagaggcccactgctgtgccaagtgggcacagggcaaatcccaaagctcttgctcagttataagacaaatagtcagtaggtgccttctataggcgaagcgttgtgcaaggcacctggaggaaaactaaagtatgtggcctgcccttacctgttatatacagcaaggcgctcggtcaaagcaaagaaagcccaaaggcattcccaagcttggtgctccagacctccctgtgcactcacatgcctgcgctctttactctcatccaggttctttctccctccctagatctgctaagaagtgtatatggatgggtcaccttttccaaagaagggtgggaacgtcctcccatcaagggaaacaagtgtcctgtggtggcaaggaataaggagagtgaggaatatgactttgtggcaaatgctttaacttggacgtaagagctaagtctggcattgctgcaattgaatggatactattgtcccaactttgcagaagactctgcgtatcttactttgggatcccctgaaagtggacctttggacaaagattttctatgcaagcagtttcttgggcagggatccaggaagcacagtgagggagaggggaacaagtgctgggaaggggaggggatcagtagaggacacgctagtcagtgggctactgctgcaggcgcatggggctcagtcccagtggggactctgaagcctagggccatgagctcaagtaagcatgcattggaataaggagaatgcccagaccttgtaggattgttggtcatagagtctgaattgacattgatagctggggacatacgggagccaggtaatacatggagtcctggcccaggtctagcttacagtggatttgtttgactcatagaccactgagtggttgttttcctaatcactcaatagagagttggaatgaaaatgcttggtggttgtcaaaagtctcacattggaaccttgacctgtagcataagagttttaataccggggaaagccaaatagaaacccaacccctgtccttggtcaaaataatttttaaaaaaacaaaatgcatccccaggagaacaatggagcttagtggtaccagcaaaaatttgaagaaggcaagggtggtatcattgccatatcccaatttaatctgttagggaagcaggagcccaggcgagccaaagtgacaccatttttaaatcaattccatcttaaaactggcaaggcatatttcttgccagtcacgacccatggtcctgagatgtttacagctaaggaagcagcttagtgatgctacaaggacacactcctacaacaacaaaaagtccagatgtcccaatactcatatatgtttccaagataattatagttacgctttgatgtacttacacactaaaatgtcaaggatagttttatttaaatcaatagaataattttgtcatgctgtcagcccacccgtatgtgggcacaacttggtttagtctctacatagacaagacccctatataaaaaattaaacttaaaataaagatgatacattcctctgcttgcttcctgaggaatgtaatggagtagtttctaataaacttgcttctttcactgtgctctgtgacttgccttgaattctttcctgcatgagatacaagaatcctcttttgagatctggattgggaccctattttccagcaacaaatccatcagtctggccactacagaaatcagagggtcatggagatgacaacgggctatcacaaactcaagcaagtagtagcatccattgtagcaagtgtgccatacgtggcaaagagagattaacacagcctttagaacatggtgtgcacaggggtgctgcccttgacctggaaatgtgtactttgccctatgtatcagcaaaaaagaccagaagtagttccccttcatgtaggactgatatagatttctcctgaggcctctttccttgacttgcagacagccaccttttcactgtttccttacctggtctttccttcgtgtgcacacatccttggtgcatctccccctccttataaggacatcagtcatactggattagtgtgctactcttataacctcatttaatcttaattacctctttaaaggccctatcttcaaatacggtcatattggaggttaaggcttcaacccatgcatttgaaagcggagggacaaaatttagtctgtaagaggcaccatggcacagatagacagaatgactcagccagctatgatcagccatctcaattctggcacaaggagctcacagagtagctaaggtgacagagaaggagattcaggttgtgcctggacctaacagcaagggctccctctcatcaaggctgatctagctttggctgctgctgcatgtccaacccatcagcagcagaggccaacaatgacacagagacctgtctagcccaagtgcgtgccccctcccaggggacgagtgtcgccaatgactggcttctgcatgggtatgtaggtccagccccttttcttcaatttgggaaaactctgatggatcattccggttatggagctcctgtggaagcaactgaggtctcagtcatagcaccatcacaggtcagcttctctctctgcccagttctgccatcctcactcccttacatgtgtatctcccaagaacactccccaataaacgtcagcactcagctctcagagtctgctttcaaaggacctatgataagacagtaacctttctaaaactgatctgagaatgagcctgcattcagaatatactttccccactgtagaacactggtgcccctcatctactttaaatatttctgtggcttattaccctagttgaaatacacacctggcattctacaaaaggaatcgaagtattgtctcaaaagactatcttcataattaatcaaggcccactgagccatagggcctccagcctttccctaactgagggatacttctgctaatggtgaagcttggtgttaaaaataatgtttagacctgttttgtgatattctgaatgtagaacagccaaagccatttagattagtgtcatttgttctcataaatgtgaataaaatgctttgtgggactaccaaattctttaaaacacgttacataaaatgtgcagataatcttaagagattccttttagagttggtgtgtttcattcaataaacttgttttatcaaatcacataacatttatttaattgtcaccaatcattcttttatttcatcatatagagtattgcatatttgtcttatttatttttttttttaccaagaaatgaactttctaaaacttatgaaaacatttggacggtagcttacaaaaatacacagtgatagatagatttttccttattctcttaaggtgtatgtggaaaataaagtacaaagatcaatggagaaactaatatcctcctgcctgcccatgttttcaagcaattaataaataagagaaaagaagaagcaaagagacaacaaaaatatataatgacatcccttcacatggggtgggggagaagcaccacctcctctccaacaggatacccacaccttccagattatctgggtagacctcaaattccaatactctgatctgccatcctcagaagatcacgtaggactgtcagataccttgttctctttggggaaagggtatagaacacagagtcccagtaatcacacaccttcttacccagcctacaatggcttcagagcacagaggctgcagtgcccttggcttcctgaccaggcgctcctggttggccttcccccagcacttcccagcagacctggttcctggtagtgacgcctttgcttttcttccaggtctatttttgtccagagtcgccaattccccaccacaagtctccgttcttttcccccaaggaccttcattggtttccctaaaggggttttcccttgcccaatcctggtgcctttgagtcacagccggcatccttgccagggggccaccagcccattctgctagctgaccaacaatcctgtttttgggtctaaggaaaagtgtctcatgtgatcatcagagcttgagccagaggacatatatgggcagggcttagaccaagggccaaaggcaacaggccccaagtgagggcagagatgtgaagtcatagatagtcactgctgctccaggcacccacctgggagagcctgcattgccccatgagtgaccaagtggtcccattcctctggatatagcaaaattaagaaccttagccatgaagaggtcaggaggcttaaagggacatttctgaagttggggcctttgcacttgaagttatccaagtagttgagcattagacgtcttcctcttaaaccttgtacgctctccaccaaaaggtttgaagcctggtaaaactcttgaaaaaatgcacaccattgtggtagccatgtcttcaattagcccctatccatagagcaacattttagctcagtgactgcaaagacaccctctcttcttattttatccctaatgcttaggttgctgctggctaatacttagtattaaataatttatttaatactaagaagaattaaataaatattgatggcatgaatgatcattctgacttgaaagggcatttattgaactttttagtccaccaaacaccataagcccttgatttttatttcttctgctctaatttctcagagcttgtagatatttcctagcaggtcatcgttgccacctgggcaagacaggaaggctaccctcatcccactcacttgttctccttttgatcatatactctcatgttcgccaatgcatcaaattggtgaccttcttctaatcacagacaagtacaataagattggaaggtgtcatgttttggcaggtgaacctgtttctataaggatcctgaaaagaccaaggtatatttattaccctcagtttctttccttgacttgctctttgcactctgatgggccagccttggaatatctccaagagcagctgttggcaggtctttcaccccaggaaaaaattatcagctctgtattactcaagttgtctctaaagatgttggtcattagccacttcactctctctcgcctgcttgtgaaatatgggttggattccttctgacatgttacatccccagttgatctcctaaagcaaataggaatttatggagacattcaacccaggagtttatgacctggctgggagggaaaatctcctgcacaaacatcttctctaatttttttgtatctttcccatctcaacattcccacttcccaaagactctaatgaaacagaagcacagtttttgattgagcacccagtctgtctactataatactctctggatcccttgttaccaatatatttataatcctatttctaactaaggagtttagttataagctaaactccagcatttcctcaggaggtgctggcctcataaatgtcctgcaagcaaggaaagtagatcttccaggaatggcaggaatcacgagaagactgaagggtcagctctttaattggaccacctcaatcgtttgggctgttaaacaatatttttgctcagtctttcccacattatagtaattaaatagttccttccacatcctcaacaaagtcaaacacagcagcttcactgggtgaaaaagaccactcttgatttgggtgaaaaatgttctttcccacccgtgaggaaggccaagcagcgaatcctcccactgctgagattagagcagttatttctgctaacactgccatcccttctctctccagaacactttctctgttatcaagttgagcaaagcaaggaaaaagtaagctggtcaaatgtttacttggttggtgagcgttgataaaatgttggcctctgtgtggttctggatgagacatgcaccccctgacccagccagccctgggctacaatgagaacgaaggagcaggtgatagctcttaaacaaccagccagtcccaggttttcagcccagtgtttgttcacttatcccagacgcttgactcacgagggaccgtgtttatactggctctgtcccagggtcactttggttgagtggtatccattggtgtggctcctacagcaaaagaccaagtcctgatgccaagagagattaggagtttgcaacgggaaagaagaggaataaacaaaaaagagtggctccaagtcaagtaagttgctgagctgacttgagcttgtttctacttgtgggaaactaaaatcaatctctggtctggttgaaataatcttcagactgtctgaacaccatagttggtggcacagatttacagacatctcagcagattggagtgcagaagagcagagagtaagtgggttatgagccagcttaaagcttcactcaatggaaactggagccccgtctttccagagaggcaaaaaatgaataataataattgtgatgacgatgatgatgatgagacattaaataaacctccttggagctttttgctgacttcttctgctggtgcctgcactttctgcctccctagaggttccaacaaaccttctgactctaaaaggaaacccttctgagaccaaaaggatagccaattatctcaagttttacagcataaataatctaattggatactaagaggagtccagatatttgcacaaaaattaaaccgtcacacagaagggtgttatacccctgcctggcctccttcttcctaaaagcctggagagtgaacagacttgagtgttgaacgacccccatttcctcctgctctaccatgagtgggcaccatggcctcaggcatgggaccaacctctccatatcctctcagtttgaggagggaggtgctatccactgtgcctcccttgataggagaaatcaagcatgcattgaagcccttgacaaagaaaaaattgctgaacagaagcaaggtctgcaggacatgggtcctattgctgctgggcattttgcaaggataaatattacatagtcactcagtttggtaggaagtttgctcacaagaattggaactggaggggctggaaaataaaaactccaatggaaaaggctaaattccttttatcttcattctttattgttaactacttaagccacataatcccctcagtgtcaggtatcccaggccaagaatcctatatacccaggcacatcgccacccctgcaccaccaggccacataatactagaaattcattcagaaaaactctttccagattgattaattggtgattgaataagtgagggaaggaataggggaaagggcagaatcagaaaatgagaagcgaacgcaggaagacaaaattagcgtggcaggtacaatggcacctgcccagatcccctctctatggacagatggccgcagctgccaggagggccattatacccttcagaagtggctgcagttgcagagagatgcctgactagggcatcccacaactgacagatccaggcaggtgtataaaggtaccactgggtcattttaacccaatgctgaacaatgctgctaagccattttagctcctgagcttccctggcatccgctgaggctgtctcctctgcatcactgctcagctcccacctctgtccactcaaacttttcttgtcctcacttccactggtgtcgatctcaagggcaccaaatatcctatcccttaaaatccattaacaaatatcctatcccttaaaatgcatctcagaatctgcctccagagaacacgactgtgaccactaggaaatgtagccaatggaaattctcaaagactaagaggagaatgaagaaggcaggggacacactcatcttctttgtgctgtcattgccattccttgtctgggtgtctgcttcagcaaggcactggagcacagtgacaaagaaacatgtgttaggttcctgggacctctttctcaccttagttttgtcactcacgagctgtgtggtcatggataagtcaatgtctcagggcctctttttgcaagttaagaaacaaggacaataatgatcctacctgacatttgagtcatcatgaggatctcctacgaccgtggatgccagtgtgcacgggagatggtaacaccccatctgctagtgacatttcccccttctccagccaaagcttggaaagacagcaggaccttgaaaatggcagccagaaaggcagccatttccaccctgagcttcaatccccaggctgaggaagtccttgcagggaggagttagctgctagaagtcatgggagaggggagggtactatctcattaaactctcacccatagatcatattgaacacctgctacctatgtgttaaactccaggccagtccacacacatagggagatggaaattaactaaacctgcaaacaaataaaaacctcccacagggaataagccaagtaacaggagttacagaaggcctccctgaggaagtcacacttgaaatgagaactgaatgacgagaaggaggtatgtcgacaaaggaggaagggaaggtgattgcaatctgagatgaatatgagtcccaagaagtcctcatggtcaggggagcagagagcagaaggcctggaacacgagggtgaagctgggagaagttgggaggcaagagctgaaaacgggctggggagaggatgagggccaagttgagcaagtcctggcaggtcaaagactattagctttatcctgaatacaacggggagttgtggaagggccttaagcagcaggcagatggttataccagctgcagagggaaggatggatggcagggaggtcagagtgggtagcattaacaaccatgagcattggttgatttactacgtgcttgacacagttctaagtgtttaaatgaagcacaggcacccaataaaataggtactattggccgggtgcagtggctcacgcttgtaatcccagcactttgggaggccaaggtgggtggattgcctgaggtcaggagttcaagaccagcctggccaatatggtgaaaccctgtctctactaaaatacaaaaattagccaggcatggtggctggcgcctgtaatcccagctactcaggaggcgtaggaaggagaatcacttgaacctgggaggcagaggttgcagtgagtcgagatagtgccattgaactccagcctgggtgacagagtgggagtctgtctcaaaaaaaaaaaggtactattaagatccccattttaaagatgaagacatgaaaatacacagagaacaaacaaacatgatgccaaccaagctgtctggctgcaaagccatacaggtaactacacaatactacatggtgggtagaccagatggacagctattttagtaatccaaatttgagtgacagcagtggaattggaaagaagtggatggattttcaagcgtgtaggagatcaaaagaaaagtcagaactcagttacactttggccacagggatgtggggagatggtttttgggagagtgatggggtggcagtgagagacactgagatataggggtccagaagaaaaccagggttgcagtatcaggacggacaggaggtcggggacagcatgagtccactgggacttgcagagatttgagatgtcccggtgacatatttcgtagtgttgtattcttttaaggatacctggttttatcctcctacaatattctggctctttctgtttgactacgatccatctggaatagtcacctgtttaatataatctggctcctgtgcacacaggaaaggagccactgtctcccttaaagtccccttccagaagcaagagtgtcctcacccctcctcagcccagcacatcctcatgcgaaatcatcacgggaagcaggacagtccctgctatgcaaggagagggcagttgagcatgagggctggttaagagaagagatttctgagcccgactccaagccctacgatttatgagttgtgagattatgtctttgcccaatttattaatctgtctaaacctcagtttttctatctgtaaaatatggttcttgagaggctgcaatgagatgatatacctaagagaaagcccagagcctggcaggcaatagccaagcgatggtagcagttattatccctagtggaaatcgcagcacatgaacactcttggattgttgtttgtttcacagctcgagtctctggaactggaggaatcccttccagttacctcctgttcttgcttttcggatgccgggggcctctcttgccagaacagcggtcatgagccatgagggcagtttctacacatcttcctagacaggatggcttggcttatgatctggaagatgttttgccactgttcagccacaagaatggttgtcatttgctccgttgcttgtaaaggaaggctcgtctatggcatttggttagtgagagcagcagtttagagaataaggaaagaagtttgtttgaagagagtctcagaaagtgaaaggtaactgttttacacagatgatggatgaagcgactccttttgcaataagcccttatctttccttaaagcttgttccaagggggaaagcctatcacctggcctactgtgattcttggagtctcctctggcaaaagaggtggcagttgtggcttgcctccatttcgttttctctgctgagacctccagaaagtcaacctgcctcagaaggtgcaggtcccatgggttgtggcccctcacgggatggttacaaggcaggcaactgagtcacacatttcgttgcttcccaggacactggagacttctcaccttgagggtgggagaggtctgacggtttgaaggaaagagggattcctacatactgcaggtcttggtagggaaaatgtctttgtttatgaagccttggcgagcacaatcatgagtgatttggggaaggatttcctggggaatggagactctgtgaaacagacaggtctcgcctcatttctctctagtccctggcagcagctgctcacaggaaagagtgcagggtctttgctaagattcactgaggttccagcactgcatagaaacaagtagctaagtgtcccagtaattgtcaccatctgtacctaagagaaaggaaaacctcacgtgtgaccatctttttttttaagcaatcatttcttgagagaataaagcagaaaaacctgaacttatccttttgcttgtactaggagaaagagaaaacgcaacaaaacacacacacctgacccctagctaacctttctcaggatggggatgggagggtcctgtctggaatctcagaagttggggcttcctaaggcacccctacacccccgtttcctggaatctgctaaaagaaaatggaaaactagccgagatatttgactgaggtttcttaagaaaacatattctcggtttgggttgttttctgaggggagggttggagcgatgtggtttaagtaagaaaattgctcatgaacagtgatggaaatagtgactctcttgactgttccacatgtctctggctatagttacaggaagcaaagtggaacagtgtttgcgaattacctggggaacacgggcagagtggacaactgatctaaaaggctggagccaagaaaacatcactgcatcagtgatctgggtaattccatggctggagcatgtgtttagttacttaagtggaaggtggggacgatcttatttcgggagcctggctagactccaagatgaaataagataacctacttcatctaatttgttgcccacactccctagagactaacgcatctcaggtctctctgacgtctatcctagtgaatctcaaaagatttattttcatactcttttaataaggtcagtcaaccaaaatctaaactacttgacttgactttgaaaatggttttagaatcacagttcatagtataagagcacaaacagtttccattatctttgaataaatccaataaataatattcacaaattctaagacacagacaattttagttgtttgaccaacagaatcagtttttctccggtgtatctttgtggttagcctttatgatgtcacgtttctgctaccaactatctattcagggaaagataaacagagggcaaacaatatttgtttataccttttgggctaaagacacaaaaattctgcttaattgccttcatcaatcagtagaagatcctaaattcctggggatcatggagctcaaatggttagggtgggccatgtgtacacagtcattcattcaataattcattcactctctcagccagtcaataagtgttgcacatctgcaaagtgcccggcactgggctaggctctgggcatttcaagatgaataagaccccacttctgaatgacgcaaagagctttccagctacacagtggcatttgtaatgtcacaggcagtccaaggagggagtggttacttcacagaagtcactagagaaaaagagtatttatgcagggcctacaaggatgggaaagattttggcagggagaagcagagggctaaggagctctagaaagatgagtttccaagtataagcaaactgaggaagctggaaatgaggaaaatggggtggtcagcatggctgaagcttgggaaatgcggagcggagtggtggcaagtaagccactgacaaattgccgagtttcttcagaagtaacgagtggggcttttctctgtagtagctgggaaccaaagaaaatgtgtgcgtggaggcagaggcagtcagggatctgatcggaaagttcagtgtgctgtcaggtgaggaatgcattacacaggtgggttggaaatactgggataggaggcaagagatacagacttgagcaaatgcctgagagggaagcagtaggttgctgagcagggcattgccgagggcaagaggagaaggaggtggctgtgcagagggggcaggccacccatctggactctgtcctggccccactcttggcagctatgggaccaggtttaagtggcctccagttcctctggagagagagaaggactgggtacagcagcccctcccccaagcctattgagacatctgtagggaagagagttcagctcactgggaaggagaagccttcaaggctggagagcgctgtggtgatgtggttatctaactttgctgtgggtcagaattgcctgggcagcatagcaagcggtcccatccctggaaactcagactgggctgcctttgtagctgcaccacactttggaaaaccctaatctcacatctggggtgttttctgattctctgtttggaggattctgaagctcagaggggctgggtgggtccagcctgaaaggggcacatcccatcacctctctctcctccaccattcacagggacgcccaacacgatgccctccgtgtcttcatctctccctctccacctcctcagtccctttccctggacttcatgggagcctgttgagctcaaaagatccccaagagccaagatgcaagcctgcagatttcaggacagctggtcctggcgctgctggctgctcgcaagggccgggcctcctcattgccgtcaccagcccccgttgggcctcatcagagcaagaccaggctcggctgatgctcggcgctgtattccttgacgcctccatgaggcttgctgcccagcatgtcccaggcttgctggaaatgctgaagctcaggctcacctcagacccacgactcagagtctgtatcttttccagatcctggagtgatcgcatgtgcacgtataaatcggagaagctttggcttccatagcctctgctggctgtaactaatccttcctcaccccatactgagggaaaagaaagaagggaagggagggaaaggaagggaagagaaaggagaaggaaggacagggggagagagagagagagaaagggaaggaaggaaggcaggaaaggaaagaaggaaggaaggaagggaggaagggagggaaggagaaagagaaaggaaggaagaacaggaggttaggagagaggaatgaaagaaagagaatgggagagggacagagggagggagagagaatgattctgtgagtctcttaactctggtcctcctgttacacatcttttcttctacttttcctttgtttcacacttaagctttgaagatgtaaagtaggaccagagggtgagaaattcaagaaccttgaaataaaagacctttctgtttgcttttcatttcctaaaaaggaagtcctcactgactgttcctgtaagggatattaagctgtgtggattgtgagtgattcgtcacacagcaatttggagcaggaagcacacgaaaccctagagctagcctgcacgcaactaattgaagccctcaattaatcggattggcttccaccttcaggagaaaagcaaatactaagaaaacaaattagcacctggaatttaacaacttcccttttttggtgtgggggcgcattatattcagagtacatgataactgatggctcgtctcataggcacagacatctttacaatcctctaaggcagagtggtgtggtggaaacggagttggcagaggcatcagatctgcccgggtttccatcccagctccagcatgcatgggccatgtcgcttggcaagcagtctcaccactcagagccttgatttcaggattaaaaaaataataacctattcaacagaatcatggtcgagaagattaggggtttgtgcaactcctcacctggtggatactcaaccggaatgagttctctttctcagttcctgcctacagatctatagacacttagctttaaaagctttgattatggccagttgcctggtcaacctaataccagcagaggagtgtattttccctactatggtggaacagaggtaaaggttttccaagtttgaagcaatcatacaaacaaaataggagcccaaagacttctgcggagctttggaatgagagatgcccattctggtttcagaaacgccagcgccatctcttggaggagcatgaaattgtttccttgggctgaagaagcatccatggggccccaggtaggttcagctggtcctctccttctttcaactgtagtttcagactggaaccccagggcttcttccaagggaaacattcttacttatttccttataaaggtcctgcatacctttgtttgtctctcttccaatcaaaccattctttctctctaatttcatcgggtccagtatttccaaatttcagtcccagtttgtaaatctacaactcaagccaaaccttcaaagactgaattttctaagtggttagttatccttctaacacagagggtcttccttctaacaccccagcagaggccgggtagcctagcactcaagatcctggactctgaagctagaccactgtgtttagcatcccctcagccttccaactgtgtgaccttggaaagttacttgacctctctgtgcctcagtttccccacccacaaaatgaggctgacagcagacaccacctagaatggttgttgcagcattacaggagttcacacctgcagcactcggtgcaggcctgtgacagatcatgagcaagtgtttgccatcatcttggttttcagtggctgttcccttacacaccacttacgacgctgggctaggatttcacttgacttgtccaggttacccaccaggcggtgtttctgtagcatgggcagtaaaggcagcataaatctaggccacactcacaaatgcacattgttagcacacaaaccccgtgattcagatgcaggtggtctgggggcctgatttttagagctgctgcactcagttttgtgctcctagggggcagggactagctccatccatctcagaccccagcctgcatgcagcaagcacccgcccccttgaaagtgctcagctcaagttgctttccttctccatcttctttaataaatgatcttggagtgaacaaatgggaggctgacagtattacactaaaataacaggagtttctggtcacctgagaagcacaatggtctctcatcttctccttactccattaggagttcatatgcctgcattttcctcattaaatctgaggtgcttttctgaactctatctgagaaggagctgaagtaatcaatgagtgtctcacacacaaacacatggaaacaggttcttagtgagagcggtggggactctgactccaaatttaatgatttttcactaaaaaggaatgacgcttcccttcactagaaagcaatgatgtcttcggtggttgcatcaatgaccaaacatgtataataaactgcttctttgaacttgaggacatctgattaagagatagaaagcaaaacaagccttcacagatggtaatagtgctgggacacatcaccttttgtgaataactgaagagcatatattaataacagaaatcacattggtgtgcccttactgaggatcgacaaaggagaacacgtctatgttttgtggaaacacgactgaagccttcatccaatgacgttggccggccccgctctcctcgtgccatcaagcactctacgctgactcagtagagcagcacagccctgtgtgtggagagattcccatgcaccatgggaagagggaccaagcctgggccctggagggcgcagccggtgcagtctgcaggaggctctgtgtttcaataactgtggtgtccccacaccccaagggccatctgtagatctgctgctccaaagtctctcacagtggctcttctttggaggtcactctccagttaagtgggggaccaactgcaaacttctcccatcaatatgaactgcaatatgatattgcagcaaacaaaacacacacacacacacacactctcccagaagcatttaacaggagaagtgtgtacctacacatttagtcccaagatctctttccaggccctgtccaggttcgtggtggaagcctgtcctctgcacactggcttccccaaatcttcccatattccagagcaggggaatcctttctccatcttttggctcagatctactgcggagtgtgggagaaatattaaaagtaatgatccttgatggttaaagctgccttatcaagttcctgcccctgggtttaaataaagtctctttttctgccagctttagataaggatggagggtgagagaaacagacagagacagaaagagagagagaagaagggagagaggcagagaagcaaggactctatagggaaagaaagagcttggacattaattcattttatgaatatttgttctactcttcttaagaacaaggtttgtcccaggtgccttgggggcaagagagaatttaaggggtggcaaggggccactgtcccgcatcttggggacgttgtaggcaggcaggtagagatgtgctaaggttcccgggtcctggagatgccaggcaagttggaaaatgcagaagaggaggctggggtggacaggggtcattttggctgaagctggttatgagaggcttagaaggtgaaagtgtctgctgtgctgggccctgaaatgtaggtcttcttggccacagtgggaaaggggagccctagaggtccttgaacagtctgagtgacaacacctgggctgcccagccccaaaggccaaaaccaagacacgtctttgtcccagaggttgggcttggtggctgcagctgtggatgctgaccctttcatgggcatggggacaggtgaaaagcaggagcgaggcaggcaggagtgggtgccagcaccagcccacagccatgaggcctgtgccaggccagcctgtggggacactgggtccccgagagagacatggaagctcccgccagcaggagacttgaaggtggtcagttctgaagtcctctcctccttaggcctggacctggggacacaggctccagccagcagcaggagcccatgaaactcatttgtcccaatcttcttcccaagtctcaacagctttcggggggttctgtgacagatgccccacttccagctccacagccagccctacgctaactctgacagatgaaaggcctcagaatccccttcttcaattgtactgcacccaacttgtggaaagcaaaacaatattaaaaatactttttaagaaactctagaatatattgtcatcaaagtgatcacggttctgcttatttttggtcatcgcaaccaatgtactgagccccctttgcccagaccctagcaggtcctgagtctcagcgtccacaaaacgaggctatggcccttggggagttccgtgcggtgccacaattggcctctgagttactctagagtgataaacgcagccttggcagtaaaataccagagaggtaatgagtgcggactccgtgctccctccgcaggggcaggtgcgtgaggctctagcgccacctcgtgggccgtgggattcgtgcccatctcctcctgggcgggagttcctctggagccaggaactctttgggctcagggtgtctttttagaaaagcttctgacgttggttcttctttagtggaccttctccggtaaaacggggttaacaactccaaacttttccccacctaaagggattgaaaggctgtttcaaaggaattagagctctgagactgcaacccacaaaacacacaatagcatatacacagagatgcacatagaaacatagacacacagggacacacaccagagatacacacacacacacacacggacaggcagacacagggccacaaacacatacacagagatacacacagaaacatatacacacagggacacacaccagagatacatacacagacacacacggacaggcagacacagggccacaaacacatacacagagatgcacatagaaacatttacacacagggactcacaccagagatacacacacacacggacaggcagacacatggtcacacacacacacacatacatacagtgatattcaacaagggaagggtgcacccacaggctcagtcttgagacctctctccaggctcctgggtgggttggggaagctgagcctccctgcctgctcatagcacacagcctccacaaatcttgctctattccagagtgagaaaggaacgttaaaactgatgatccctgatggccaaggctgccttatcaagatcctgttcccgattcaataagaaaagatgcctcttgtgccagcagcagataaggctgcagccctgggcgttcccaggagagcgaacaatggaagcccccaggatgcctctatatgaggtaggatggttacttgcccagtccctgcctgccaggcccttatctgggaggcgctggttcgggttgcaccctcctgtgttcctagcgggggctgctgcacaccaggcttctgaggccttcctggtgggggttggtggaatggcggcggggggagggttttgacggtgcatcctgaagtgctccctgcacctttcccagaaaaagaaaaggatgccatgaaaacacttcaccctagacatggtttaccctcgggaaagctgatgtgaaagaagttccagggggccagggatagaaaaggatttagaaagatgaaggcaacagacaaacgacacttacaaagtgcccaaagtctgcaagtcctgatagtcacagggaaggacatcagctggcgggaaacctcaccttttaggcctgcatgtcagtcttgcactgctgagctgtgtgaccctaggcaggctacttaaaccctctgtgccctggcatctccatctacagaataaagcttctaacagcataggcctcacacacctgtgtggagaccccataagtcgacaacatgtgtttacccgaggaaataaatatgggtgcccctttaggcctgtcccacagagttatacagctgaaagacctcagagtaggtccacaccccttaccaagtaatgcaggccttgattaattgccacttgaagggaggtggggagaaagcaccctgtcacatcacagctaaatttactaaaaaagaaactctttgcccacttatctttcgaaagtgcctcacagcagagacagccccaaccccttcctctctctccagcctcacctctcctcctaaaattcagttcctcctcacactctcagtgcctggccccggccatgcattagatgccctgaagagcttttgaaaaggaccaatccctgggccctatctcaggtgtgtctgagcatctgtagattttagaagctctgaggaggatttacatgcatttagggtggaaatcacttgtaagtaaatttttttaactgttccctgttaaaaaatatgaaccaatggaccaatggaccacttatggcttctgctaattctcttacatatgcccatggtaccttgttgcagtatcatttgtataataaaaagattggagccaaccagaaagtccatcaatggggggaaaattaaataaaatgtagttcattcagcaatggaatactatgcagctctgaaaaatgaatcaggaagctttctatgaacagatgtggaaagtctccaatgtatagcattaagtggaaaaagcaagacataatggtagtgtgcacgttctatattacaaaaaatgtgaataaaggcagtttatattcatgttttcttggatatacatttaaaaaactctaaaaagatacacaaagaatggtctagtagtcattatagggggtctgggaaggcaagagataatatatcatattttcaaatttttgaattatgagaacatgtcattcattcaaaaattgaatgtaaaaagggttaagaaagagaataaagcaagggccgggacacatctccactgtcttcccatggccctctcagaagtggatcacacctggtgctaggcagggggacagaaattgctgtggcctgagcagagcctgggtccagccagcatctacacagcccacgtcctcccaggggaatttctctgtgctctgttttgaggggatggtcctggtactggagtagcagagccaggtccctgcttcttgcataaccctgaggctgccctgtttgctcttcttgtgtggagggcattggcagaggcctctggcctgtagaacctttgtgagctgagccacaactcacttcgagctgttctctgccctggctttgctaccctgaggtctccagtgccatccacaccttccgtctgccactgccaacagccacaggtgatggatggggaccataatgtgagaggagaattgtgtactggaaatcagcatgaagggatatccaaagacctggagaaacccaaatcacatggggatgggagagtgaagacccaagggagggatgtgcggcaagacctgctctgagctctgagggtgcagatgtaatcaagactgagtgctgccccaccagacctgtagacgaactctccttctggtgaggcagtgaacctgcaagcacgggaaggtggtggtgggttgggtgccatggaggaaatgaggaagcaggagatacactgggggccaggtggggttgcaggtctcagcagggtggggctgaggtggtgatgggtgagggagtgagctgtggagtatccagacagggaaagcagcaagtgcaaaggtgctgggacaggagtggattttgcgggtctgcagggcagtcggtgtactgggagtggagtggatgaggtaggacatggaggctacagagtctcagaacccgtcagaggctggtgtgcagtcaggttctgcagggcattgttggccactaggaggattacaactttttctcttaccccaagtggacttgaaaccattggagggtctgagggaagagtgatatggtcagatgaagtttttaaatcatgtatttaattattctagttgatgtgtagagaatggaattggtgagggaggagagagtagaagtagggggacaagttaggactgatgggagattgagttgctccttggccgtcacaggattctgcatcctctgcctttaccatgggccttgcctgcctctcccagggacagagtgtacccctccaaccttattgactgcgcatttggccatgtgacttgctttgcctcgagggacatgagcaaaggccacatctgagcagaagttttgagggccattgcctggttggctcttgcttttttccctctgctctgagaagaggcatttccaacagggggtaccctccagtccaggtcctagaatgggaaagcctatggagcagggctgccaccgtggcacacagccatgacagaggtgggagtgagaatgagatggctgtcgtcgtaagccttggagatgtggagagtgctgaccgacacaggggcccttggggtaccagactacagaggcactgctggaacggtgtgaggtgagttgactttgtaatgttttctgaacagcagagctacccaaattggagtttgatgtatggcattagggagagtttgatttggtttagggatatgttaagttcgagatactcattagacatctaggtagaggctggagttcctggaaaatgtcaactacaggtacaacttggagtcatcgtctcacatttgcaaactcaatatatgcaaatggtatgaaaagtcatgaggctatacgtgatcaaccagagagagggtgtagaaagaggtgtcttcttaggacctggggcactccagcatgtgcagaatggagatctcaaagggcgagtgagcactgacctggtggtggcataggcaggtgcatgtcagggagagagaacctgtgtgcaaatacaaggaaggtgagtgacatggtttggctgtgtccccaccaaaatctcatcttgaattgtagctcccataattcccacatgttgtgggagagggcaggtgggacatacttgaatcatgggggcagttctcgtggtggtgaataagtctcgcgagatctactggttttataaggggaaactccttttgcttggctctcgttctgtctttgctggctgccaggtaagatgtgccttttgccttccatcataattgtgaagcctccccagccacttggaactgtgaatccattaaacctcttttccttttataaattacccagtcttgggtgtctttatcagcagcatgaaaacggactaatacagtgagagagcatgacaccttcaagaagggggcagaggacaaactctccagcctgcctgggctcatgcccagcactgtggcccttctctatccaggagccttccctgtcattatgcacaccctcagtcactgtcctctgcttggcagcacctctctggactcacggtttgtggaccagtttgttctcattaatcccacgacttaaatttctagcacccatgacacacaacctttccctctcctaactcaacccctttgtcactttcccccacttctgacgtaaaggtaacccatcttccccaattacaatttcttgtggcccagccttgccccagtaccaatttttaggagatgatttttgtcaccataggttttattttactgtgaaaggcataagatttgtttggggctcttctctctctatgtccaccttccctgccctcaagttcaccatgctcccccagcatgatctccagtcttccctaatggctgttggctccacttccctccagcactctaagagttatcagcctgcagaattatgagctgctcaggtcaccctacagcaagtcactcctcccacccagatcattctccctcaacccatcagagcaatccctggaaaacaggaaggtggcccttcactccctcccctgccacactcccgcctggtaattccaccatggctgctttcagcctcacagggacctcaagtccctggatacttccatccatgccatgatgtctggaactctcaagaaatattttggacagtttatctgcctgctcttggatttattgagcagggaagaaactctgtaagttcacatatctctactctatccctgacaattttttctgggactggagaggaaccagaaagggaatggagttggggattgaggaaagaggggagaaacaagagaagggaataccttgggcagctgggcaagaagaaacaaagccacaccatccagagacagggattttggaataactgcaaagtcacaaaagtattgggaagatgacttaatgcccttgaattcaagtcctcagacatacacagatattgtggtgatcatcatagcaaagctagccttcccaggaaagagaatgccagaggttttcctcagaggaggcatagaattagcctagccagtgaccagttagccagtgaccagttaaaggacaagtgttgactttgactttaccccagtccactcacgctgccacccccatgccctacagacccagccatgtccttgtgtaaagcacaccaggagacaccaaaggtatcacagagcaggtccaagtgggacatgggttctgaaaccttaatgcaaaccaatggcatgctggtatctgatcccaccatgaccttcatctcgagaaaggtgccacgaggctgtttcttgaaaggaagttttgttgacctggttcctatactgaatatgaccactcactacctggatttctttagccatttggaataggagcaagaccacaagcgctcattaccttcctgcatgaaattacatctcctgggaggaagagagccataaacatcaaggtgggtgtcacctggtcttaatttcttggcttcattagaaaaatctgagaacttggaatgacatacccacagagaacatttgggtttacataaactagtatatccttcatgtataaatacatagtttaatgtaaaagaattgtgggcccaaaccaacagttttagggtatttaattaggatattattcaataagcacaaacggctcttcctaggtcggtatttgattcaccactgaaaaatttgaaactaggaagcaaatctctagagaagttgcatttattattttggagtaatggtaaactttggggatttgatgaaaacgatgggccatctcatcataaaaattcacacatacaaacatttttttctatgcaatttagagggtacccagccctagctaagaatctctgatctattgattaaaattctaaaataactaaaataatatgcatttatttatttatttatttattttgagatggagtcttgctctgttgcacaggctggagtgcaatggcacgatcttggctcactgcagcctctgcatcttgggttcaagtgattctcatggctcagcctcccgtgtagctgggattacaagcacgtgccaacacgcccagctaatttttgtatttttagtagagacagggtttcaccatattggccaggctggtcttgaactcctggcctcaagtgatccacccacttcggcctcccaaagttctgggattacaggcatgagccaccatacccggccccaatatgcattttcttagtgcctgaaagctacgatgacatgggcatgaaatgggcccagtgcagactacatgtgtgagaagagacttccttcaggccagcacgacacttcttccctatggtcacaagtgcctttttcctctttgtgtaacaactcctctctaaccatctgcagtttgcatgtgttgaaccaaaccctaactccaaaaacttaggtctggtcagttgaaacctcccatttatttggctacagtgatgggtttggggatggatatgtgaccaaagtcagtgagtgagactcaattccaggactctcttgagactactgggaaaaacaatgctatttctgttggagtggttgagaggccatgatgtaagccagggattctcaaccagtggtgatttcacctcccatgggacatttgggaacacctggagacatttttggttgtcacttctagggatgtgctactgacatgtattgggtagaaaccagggatgcagttgaacctcctacaaatgcatgggacaaccatccccaacaaagaattattctgccacaaatgccaataatgcagaggttgagaaacgcttctgtaagcttagagtttgagcaactattttggtgttgcataaaatgagcctgcccaagactgaggccaactgaaaggagataaagctgagagatggaggaagggcaagtcatgaagatgtcctttgagatctgggatgcatctctgtctgaagttgagccctggactttacaaaactgtatcatttacaagtaattgcttcctgattcagccttctgttgattcaacaacacatgttcgttaggtggctgccaggtgccaggactcttactttcattgagttataccagcaacgatgttaatgagaaacaaataacacagataaataaagaaaatagaactgggaatggcggattgcatacagaggctaattcagatgaggaggaaactggaaatcaacaacagaacatcctccgtgtgcatatattgtggtctatgatgtatgaaaatgtaaagtacatgatatttggtgctcctgaaagagtgtggctgcagtcacagtcatcaaatccttgcagtgtcttcacaaaatctcaagttcagaacccctctaggattgctatgtaggtactagtatagaagagagcatttctgatctgtaaagagaaaacatgcaggattctgccttcagatggcattttatttcctggctgggggcatgagacagacttttggtattgaaggactttgactcctagatgctggcaaggctgtggagaaatagaaacgcttttacactgttgctgggaatgtaagttaattcaaccactgtggaaggcagtgtggcaatttctcaaggatctagagccagaaataccatttgaccaagcagtcccattactggatatatacccaaaagattataaatcattctgttataaagatgcatgcacacatatgtttattgccacactatttataatagtaaagacttggaaccaacgcaaatacccatcaataatagactggataaagaaaatgtggcacatatacaccatggaatactatgcagccataaaaaggaatgagttcatgtcctttgcagggacatgggtgaagatggaagccatcattctcagcaaactaacacaggaacagaaaaccaaacactgcatgttctcactcataagtgacaattgaacaatgagaacacatggacacatggaggggaacatcatacaccagggcctgtcgggaggtggggggcaatgggagggagagcattaggacaaatacctaatgcatgcaaggcttaaaacctagatgacgggttgataggtgcagcaaagcaccatggcacatgtatacctaggtaacaaacctgcacgttctgcacacgtatctcagaacttaaagtaaaatttaaaaaaattaaaaaataaaataaaataaaaataaaacgattttgacaccacgaaattgctgagtcctgaaagagaacaaatggttctgtgcagaccaggcactacagagaggtgcagagctgaggggcaaatgaaggctcacatggagcccaagctcccatcacccagtcttgcacttgccttgagtgtgtgtaaccccagggaggggcacattgttatgaattatttgcccagagggtttgtctgccctgagcaagtgcctttacttatttacacaaaggggtcctctgtgctgggtggtagccccactggtggaagctgtagtgtgccccaatctctcttctcatgccttctccatagtcacagagcaatgacagcattcttctggccccttgctgtcagatgcaggcactgcctaccatctgatcaatggggagtaatcacacatgccatgcagcagcttatagggacttccctaagggacatctgtcacatgctttttgtccctgttctttatcctttcctcattagtgctagctggactgcagatgttattcaaccaaagacacatgccctgatgaaacgcacacggggcctgctggggaagcacttgttggagaaaactccaggagtcaggagcagaagtgagcatgtggatcacctgttggacataatggttctgcagcagtgcacagagggcttacagggcctggcatctgactgtgggagagggacttaacccttaggagggttttaaacttatgtctcctagaaagactaggagtttggatccaacagcagtaagaggcagcgggacctgtctctggtttaattccatcagctcagattcatggctgaggaacactcattccatcccttggtgaaccagggtttgaagtccaaaccttgcagtctcagtttccatgacatggcagatgggacctgatttgccacctcgagcactcagctgtaccaactcagacaccaacttgtgggaaatcagtcttgaaaaagacttgtagcctgtgttggtcagttgttccaacacaagtctcagagttgctctgtgaaggtattctgtagatgtggttagcatcaacaatcagtttgctttgagtaaagaagattatcctttttagcctgggtgggtgggccatgttgaaagacattaagagccacactgagaaagaagaaatgctgcttgtagatgacaatgtcagctcccaccacagtttccagcctgctagcctaaggatttcaggctttcccagccagacccccaattccttgaaataaataaatatatatcttactggttctgtttttctggtagaactctgatacctagtgcaagtccaacttggacttgcttttccatgaatatgttggaattagagcatctatgtttgaccagcataactatgcacaggggagcaacaagataacaaagatcctggatcttcttaccctgcggatccacaatagcccttggccatacacctctggatttttacacagaaaagatgcaaacttctacctcaatgaagccattgtttttcttctctcatagcaaacttaatcctaagtaatgtatatttattgggtgactattatttgctcaacagataaggaaagagaacttctgaggaactaaatgacatacccaagatcacgcaaccagcaagtggtaggaataaatgcacgcctgtggggtttgaaagcccacactatttgaactacaaaatccagaatttcagggtcccacttatgcttctacaacagcccttttacatctaggcgtggggggaatatttccttaagcaatagtctttggcttcagaaaatctgagcgtcgtcatatactttcacaatggaatgagagaagagccagccaaaggtatttcagaagcagagagagcactttgcagatctaaggtctaccaaggctatctcagcttagccattcttcaggtctaacgcgatgtactaggttagacagaagtcacaggccgaagtccagagaaaacaagatgcatcagtcactgtgtaactatttattgctgtgtaacaaatttctccataaacatttattatctcacagttttggtggatcaggcattcagaagcagctcacgtgggtggctggtggctcagggtctctcatgaggtttcagttaagatgttgaccaagactgaggttacacgaaggcttgactggggctggagaattggcttttgacaggaggcttcatttcctcatcccatacacttctctgtagggctgcaagtcttcatgacatggcagtctcttcccccagaataagtgatgcaaagagaaggccacgctgccttctatgacccagtcccagaagtcacacactgtcacatctgctatattctattcattaaaagcagatcattgggtccaacctatacaaaaagggtggggaaattaagctccactcttgaaaagaggaaaatcataggcgacccatattagaacaagacagaattctgcacagactttcatcaacaataactaaccaacagagggcatttggcagaggaagcaaaccttctgtggaataacgaaacctacggtacagagagtgaactctcagccacctcccaggaggacatgaaacatcctctgcagagaacaattagagtgcagcacatttcacaacattgctgaacactgctccaacaggggcatgctcctggtggaagcaaaactggggctcagcttccatcctaggcctctggacccgtgatgggaagggttctttttccatattatttaaaaaataactaaagtcaaagggacattgtatatacagaacagtgtttgaaatgaacatgtataaccaataaagaaaacactaccacaaagagaattagaacattgccaggctcttaaaagatctgattctcccttcttaaccccatccctcttcttcccgttgagaggtaatcactatcttggctttggaataatcattcccttgcttttcctcgtttttttgtttgtttgttttgcttttttcactaccattgcatgacccctaaataatatattatctttctctgctttcaaaatgtaaataaatggaaccatatcatatatgttgtcctgctacatgcccctttggtgcgacagtgagtttgttagtttcattaattgctgtataaactccattatgtggatatacctgcattggctaatccaatctaatgttgatggattcttggttgatgaatgctcatgaaaaaatttcttttttctatatgcatgacccaatcacctcccaccaggccccaactccaacactggggattacaactgaacatgagatttgagcagggacatagatccaaactgtatcagacttttttttattaactttaattttgagttcaggggtacaagtgcaggtttattacatagataaacttgtgtcatgggtgtttgttgtccagactatttcatcactcaggtattaagcctagtacccataagttatttttccagatcttctccctcctcccaccctccccgctctgaaaggccccagtgtgtgttgttcccctctatgcgtccatgtattctcatcatttagctcccacttataagtgagaacatacggtatttggttttctgttcctgtgtgagtctgtgaaggataatgacctccagctccatc
